(19) United States
(12) Patent Application Publication
(10) Pub. No.: US 2014/0057969 A1
(43) Pub. Date: Feb. 27, 2014

(54) Oncovector Nucleic Acid Molecules and Methods of Use

(71) Applicant: THE REGENTS OF THE UNIVERSITY OF CALIFORNIA, (US)

(72) Inventors: Gregory I. Frost, San Diego, CA (US); Mark Roman, San Diego, CA (US); Frank McCormick, San Francisco, CA (US); Tanya Meyer Tamgüney, San Francisco, CA (US)

(73) Assignee: THE REGENTS OF THE UNIVERSITY OF CALIFORNIA, Oakland, CA (US)

(21) Appl. No.: 13/801,940

(22) Filed: Mar. 13, 2013

Related U.S. Application Data
(60) Provisional application No. 61/617,514, filed on Mar. 29, 2012.
(60) Provisional application No. 61/614,334, filed on Mar. 22, 2012.

(51) Int. Cl. A61K 48/00; A61K 31/513; C12N 15/85

(52) U.S. Cl. CPC A61K 48/0058; C12N 15/85; A61K 31/513
USPC 514/44 R; 435/320.1

(57) ABSTRACT

Provided herein are non-viral nucleic acid vectors, including non-viral oncovectors, that are autonomously replicating plasmids (ARPs). The non-viral nucleic acid vectors exhibit fusogenic activity and can exhibit other anti-tumor or cytotoxic activities. Also provided herein are methods and uses of the non-viral nucleic acid vectors for treating cancer.

### RELATED APPLICATIONS

[0001] Benefit of priority is claimed to U.S. Provisional Application Ser. No. 61/614,334, filed Mar. 22, 2012, entitled “Oncovector Nucleic Acid Molecules and Methods of Use,” and to U.S. Provisional Application Ser. No. 61/617,514, filed Mar. 29, 2012, entitled “Oncovector Nucleic Acid Molecules and Methods of Use.” The subject matter of each of the above-noted applications is incorporated by reference in its entirety.

[0002] This application is related to International PCT Patent Application No. (Attorney Docket No. UCSF-434WO), filed the same day herewith, entitled “Oncovector Nucleic Acid Molecules and Methods of Use,” which claims priority to U.S. Provisional Application Ser. Nos. 61/614,334 and 61/617,514.

[0003] The subject matter of each of the above-noted related application is incorporated by reference in its entirety.

### INCORPORATION BY REFERENCE OF SEQUENCE LISTING PROVIDED AS A TEXT FILE

[0004] A Sequence Listing is provided herewith as a text file, “UCSF-434_Seq_Listing” created on Mar. 12, 2013 and having a size of 1,964 KB. The contents of the text file are incorporated by reference herein in their entirety.

### FIELD OF THE INVENTION

[0005] Provided herein are non-viral nucleic acid vectors, including non-viral oncovectors, that are autonomously replicating plasmids (ARPs). The non-viral nucleic acid vectors exhibit fusogenic activity and can exhibit other anti-tumor or cytotoxic activities. Also provided herein are methods and uses of the non-viral nucleic acid vectors for treating cancer.

### BACKGROUND

[0006] The desired goal of cancer therapy is to kill cancer cells preferentially, without having a deleterious effect on normal cells. Several methods have been used in an attempt to reach this goal, including surgery, radiation therapy, chemotherapy and therapies with viral oncolytic vectors. Each of these has its limitations. Because of the limited effectiveness of the available therapies, there remains a need to develop alternative strategies for treating cancers and other diseases. Accordingly, it is among the objects herein to provide such alternative therapeutics and methods of treating cancer.

### SUMMARY

[0007] Provided herein are non-viral nucleic acid vector constructs that contain: a) an origin of replication; b) a first open reading frame coding for a fusogenic protein; and c) a second open reading frame coding for a replication initiator protein that activates the origin of replication for episomal replication of the vector in a cell in which it is expressed. The non-viral nucleic acid vectors include non-viral oncovectors. Any of the non-viral nucleic acid vectors provided herein can contain at least one promoter that is operatively linked to control expression of a first and/or second open reading frame. In some case, the non-viral nucleic acid vectors contain at least two promoters. The first and second promoter are the same or different.

[0008] In some examples of the non-viral nucleic acid vectors, including non-viral oncovectors, provided herein the first open reading frame and second open reading frame are separated by an internal ribosome entry site (IRES); and the first and second open reading frame are expressed under control of the same promoter. For example, the nucleic acid can contain in reading frame order 5′ to 3′: a promoter operatively linked to control expression of the first and second open reading frame, a first open reading frame coding for a fusogenic protein, an IRES, a second open reading frame coding for the replication initiator and an origin of replication. In some instances, the nucleic acid contains in reading frame order 5′ to 3′: a promoter operatively linked to control expression of the first and second open reading frame, a second open reading frame coding for the replication initiator, an IRES, a first open reading frame coding for a fusogenic protein and an origin of replication.

[0009] In other examples, the non-viral nucleic acid vectors, including non-viral oncovectors, provided herein contain a first promoter that is operatively linked to control expression of the first open reading frame coding for the fusogenic protein; and a second promoter that is operatively linked to control expression of the second open reading frame coding for the replication initiator. For example, the nucleic acid can contain in consecutive order: a first promoter operatively linked to control expression of the first open reading frame, a first open reading frame coding for a fusogenic protein, a second promoter that is operatively linked to control expression of the second open reading frame, a second open reading frame coding for a replication initiator and an origin of replication. In some instances, the nucleic acid contains in consecutive order: a second promoter that is operatively linked to control expression of the second open reading frame, a second open reading frame coding for a replication initiator, a first promoter operatively linked to control expression of the first open reading frame, a first open reading frame coding for a fusogenic protein.

[0010] In examples herein, the non-viral nucleic acid vectors, including non-viral oncovectors, provided herein, contain a non-viral nucleic acid vector, containing: a) a first nucleic acid molecule containing an origin of replication and a first open reading frame coding for a fusogenic protein; and b) a second nucleic acid molecule containing a second open reading frame coding for a replication initiator that activates the origin of replication in the first nucleic acid molecule when the first and second nucleic acid molecule are delivered into the same host cell for episomal replication of the first nucleic acid molecule. In such examples, the first and second nucleic acid molecule are part of the same molecule or are separate nucleic acid molecules. The first and second nucleic acid molecules can each contain at least one promoter that is operatively linked to control expression of the first and second open reading frame. The promoter can be the same or different.

[0011] In examples provided herein, the non-viral nucleic acid vectors, including non-viral oncovectors, contain an origin of replication and replication initiator selected from among: a) an SV40 origin and an SV40 T antigen; b) a BKV origin and BKV large T antigen; c) a BKV origin and SV40 T antigen; d) an EBV origin and Epstein Barr virus Nuclear Antigen (EBNA); and e) a JC Virus origin (see, e.g., Frisque (1983) J. Virol. 46:170) and a JC Virus large T antigen (see, e.g., Sock et al. (1993) Virol. 197:537).

[0012] In particular, the origin of replication is an SV40 origin and the replication initiator is an SV40 T antigen. For example, the SV40 origin contains an SV40 large T antigen core binding site set forth in SEQ ID NO:123, or a variant thereof having the formula set forth in SEQ ID NO:124 that exhibits at least 80% sequence identity to SEQ ID NO:123. For example, the sequence exhibits at least 85%, 86%, 87%, 88%, 89%, 90%, 91%, 92%, 93%, 94%, 95%, 96%, 97%, 98% or 99% sequence identity to SEQ ID NO:123. In some examples, the SV40 origin of replication contains a variant SV40 T antigen core binding site set forth in any of SEQ ID NOS: 125-189. In other examples, the origin of replication is a modified SV40 origin that is modified to remove upstream enhancers. The origin of replication also can be modified to remove CpG motifs and/or is human codon-optimized. Exemplary of such an origin of replication is an SV40 origin of replication that has the sequence set forth in SEQ ID NO:113, 114, 115, or 116 or that has a sequence that exhibits at least 80% sequence identity to any of SEQ ID NOS: 113, 114, 115 or 116. For example, in some embodiments, the sequence exhibits at least 85%, 86%, 87%, 88%, 89%, 90%, 91%, 92%, 93%, 94%, 95%, 96%, 97%, 98% or 99% sequence identity to any of SEQ ID NOS: 113, 114, 115, or 116.

[0013] In examples where the replication initiator is an SV40 T antigen, the second open reading frame can code for a replication initiator that is an SV40 large T antigen. The replication initiator, for example, SV40 T antigen, can be one that is modified to remove CpG motifs and/or is human-codon optimized. For example, the SV40 T antigen has the sequence set forth in any of SEQ ID NOS: 561, 562 or 563, degenerates thereof or a sequence that exhibits at least 80% sequence identity to any of SEQ ID NOS: 561, 562 or 563 or degenerates thereof. For example, the encoded SV40 large T antigen has the sequence of amino acids set forth in SEQ ID NO:564, or a variant thereof that exhibits at least 80% sequence identity to SEQ ID NO:564. For example, in some embodiments, the sequence exhibits at least 85%, 86%, 87%, 88%, 89%, 90%, 91%, 92%, 93%, 94%, 95%, 96%, 97%, 98% or 99% sequence identity to SEQ ID NO:564.

[0014] In particular examples of the non-viral nucleic acid vectors, including oncovectors, provided herein, the replication initiator is one that encodes an SV40 large T antigen that is modified to reduce its cellular transforming activity. For example, the encoded SV40 large T antigen is modified to reduce or eliminate binding to p53, HSP70 or Rb. Exemplary of encoded modified SV40 large T antigen are any that contain at least one amino acid replacement at an amino acid residue selected from among L17, G18, L19, E20, R21, S22, A23, W24, G25, N26, I27, P28, L29, M30, R31, K32, L103, C105, E107, E108, S112, S189, N366, D367, L368, L369, D370, D402, T434, L435, A436, A437, A438, L439, L440, E441, L442, C443, G444, P453, V585, D604, S677 or S679 corresponding to positions set forth in SEQ ID NO:564. For example, the encoded modified SV40 large T antigen can contain an amino acid replacement selected from among L19F, P28S, L103P, C105A, E107K, E107L, E108L, S112N, S189N, D402R, D402E, P453S, V585R, D604R, S677A and S679A. Exemplary of such amino acid replacements include, but are not limited to, E107L/E108L; E107L/E108L/D402R; E107L/E108L/P453S; E107L/E108L/V585R; E107L/E108L/D604R; L19F/E107L/E108L/D402R; L19F/E107L/E108L/P453S; L19F/E107L/E108L/V585R; L19F/E107L/E108L/D604R; P28S/E107L/E108L/D402R; P28S/E107L/E108L/P453S; P28S/E107L/E108L/V585R; P28S/E107L/E108L/V604R; L19F/P28S/L103P/C105A/E107L/E108L/V585R; L19F/P28S/L103P/C105A/E107L/E108L/D604R; L103P/C105A; L103P/E107K; C105A/E107K; C105A/D402E; C105A/V585R; E107K/V585R; E107K/D402E; L103P/D402E and L103P/V585R. For example, in examples of non-viral nucleic acid vectors provided herein, including oncovectors provided herein, the second open reading frame codes for a replication initiator protein that is an SV40 large T antigen containing the sequence of amino acids set forth in any of SEQ ID NOS: 565-604, or a sequence of amino acids that exhibits at least 80% sequence identity to any of SEQ ID NOS: 565-604. For example, the sequence exhibits at least 85%, 86%, 87%, 88%, 89%, 90%, 91%, 92%, 93%, 94%, 95%, 96%, 97%, 98% or 99% sequence identity to any of SEQ ID NOS: 565-604.

[0015] Included among the non-viral nucleic acid vectors provided herein, including non-viral oncovectors, are those in which the encoded fusogenic protein is a fusogenic protein that is a viral or eukaryotic fusogenic protein. For example, the fusogenic protein can be a VSV-G (Vesicular stomatitis virus G protein), MV (Measles virus) F protein, SIV (Simian immunodeficiency virus) F protein, HIV (Human immunodeficiency virus) 1+2 F protein, MuLV (Murine leukemia virus) F protein, Chicken LV Env Protein, SER virus F protein, NDV (Newcastle disease virus) F protein, GALV (Gibbon ape leukemia virus) F protein, SV5 (Simian virus 5) F protein, PPRV-F protein, Mumps F protein, Sendai virus F protein, Human parainfluenza virus types 1 (HPIV 1) F protein, HPIV 2 F protein, HPIV 3 F protein, CDV (Canine distemper virus) F protein, R′Pest F protein, SV41 (Simian virus 41) F protein, HRSV (Human respiratory syncytial virus) F protein, Human endogenous retroviral-3 (HERV-3), Reovirus FAST proteins, Avian Reovirus p10, Avian Reovirus p10 (S1133 variant V68I), Reptilian Reovirus p14, Baboon Reovirus p15, Eukaryotic Membrane Fusion Proteins, EFF-1, AFF-1, Tetraspanin Proteins, Yeast G Protein, Syncytin 1, Syncytin 2, Syntaxin (SNARE) or SNAP25 (SNARE), Synaptobrevin (SNARE) and variants thereof that exhibit fusogenic activity. In particular examples, the fusogenic protein is selected from among Reptilian Reovirus p14, Baboon Reovirus p15, Avian Reovirus p10, VSV-G fusion protein, SER virus F protein, SV5F, NDV F, Mumps F, Measles F or variants thereof that exhibit fusogenic activity. For example, the fusogenic protein is one that has the sequence of amino acids set forth in any of SEQ ID NO: 38, 39, 40, 41, 42, 43, 44 or 53 or a sequence of amino acids that exhibits at least 80% sequence identity to any of SEQ ID NOS: 38, 39, 40, 41, 42, 43, 44 or 53. For example, the sequence exhibits at least 85%, 86%, 87%, 88%, 89%, 90%, 91%, 92%, 93%, 94%, 95%, 96%, 97%, 98% or 99% sequence identity to any of SEQ ID NOS: 38, 39, 40, 41, 42, 43, 44 or 53. For example, the non-viral nucleic acid vectors provided herein contain an open reading frame coding for a fusogenic protein having the sequence of nucleotides set forth in SEQ ID NO: 6, 8, 10, 12, 14, 15, 17 or 27 or a sequence that exhibits at least 80% sequence identity to any of SEQ ID NOS: 6, 8, 10, 12, 14, 15, 17 or 27. For example, the sequence exhibits at least 85%, 86%, 87%, 88%, 89%, 90%, 91%, 92%, 93%, 94%, 95%, 96%, 97%, 98% or 99% sequence identity to any of SEQ ID NOS: 6, 8, 10, 12, 14, 15, 17 or 27.

[0016] In examples of non-viral nucleic acid vectors provided herein, the open reading frame coding for a bystander protein is a fusogenic protein that is modified to remove CpG motifs or is humanized. For example, the open reading frame codes for a fusogenic protein having the sequence of nucleotides set forth in SEQ ID NO:7, 9, 11, 13, 16, 18 or a sequence that exhibits at least 80% sequence identity to any of SEQ ID NOS:7, 9, 11, 13, 16 or 18. For example, in some embodiments, the sequence exhibits at least 85%, 86%, 87%, 88%, 89%, 90%, 91%, 92%, 93%, 94%, 95%, 96%, 97%, 98% or 99% sequence identity to any of SEQ ID NOS:7, 9, 11, 13, 16, 18.

[0017] In additional examples herein of non-viral nucleic acid vectors, the encoded fusogenic protein is a viral fusogenic F protein that contains an F1 subunit, wherein the F1 subunit has a modification in the N-terminal fusogenic peptide to increase the fusogenic activity of the encoded fusogenic protein. For example, the modification is an amino acid replacement (substitution), insertion or deletion. In examples where the modification is an amino acid replacement, the amino acid replacement is replacement of at least one Glycine residue with an Alanine.

[0018] In particular examples of the non-viral nucleic acid vectors provided herein, including oncovectors, the encoded fusogenic protein is a modified SV5F protein that has an amino acid replacement in the F1 subunit at an amino acid residue selected from among 105, 109 and 115 corresponding to positions set forth in SEQ ID NO:44. For example, the encoded modified SV5F fusogenic protein has an amino acid replacement selected from among G105A, G109A and G114A. Exemplary of such encoded modified SV5F fusogenic protein include those that contain an amino acid replacement selected from among G105A/G109A, G105A/G114A, G109A/G114A and G105A/G109A/G114A. For example, the fusogenic protein contains the sequence of amino acids set forth in any of SEQ ID NO: 45-51 or a sequence of amino acids that exhibits at least 80% sequence identity to any of SEQ ID NOS: 45-51. For example, in some embodiments, the sequence exhibits at least 85%, 86%, 87%, 88%, 89%, 90%, 91%, 92%, 93%, 94%, 95%, 96%, 97%, 98% or 99% sequence identity to any of SEQ ID NOS: 45-51. In examples herein of the non-viral nucleic acid vectors, the open reading frame coding for a fusogenic protein has the sequence of nucleotides set forth in any of SEQ ID NOS:19-25 or a sequence that exhibits at least 80% sequence identity to any of SEQ ID NOS: 19-25. For example, in some embodiments, the sequence exhibits at least 85%, 86%, 87%, 88%, 89%, 90%, 91%, 92%, 93%, 94%, 95%, 96%, 97%, 98% or 99% sequence identity to any of SEQ ID NOS: 19-25.

[0019] In other examples herein of non-viral nucleic acid vectors provided herein, including oncovectors, the encoded fusogenic protein is a modified Ser virus F protein. Exemplary of such an encoded fusogenic protein are those that have at least one amino acid replacement selected from among L539A, L548A, L548V and L548G corresponding to positions set forth in SEQ ID NO:53.

[0020] In the examples of non-viral nucleic acid vectors provided herein, including oncovectors, the promoter is a constitutive promoter, a tissue-specific promoter or a cell-specific promoter. For example, the promoter is a CMV promoter. In other examples, the promoter is a cell-specific promoter that is an endothelial nitric oxide synthase (eNOS) promoter; a vascular endothelial growth factor (VEGF) receptor (flk1) promoter; an insulin promoter; a promoter of gonadotropin-releasing hormone receptor gene; a matrix metalloproteinase 9 promoter; a promoter of parathyroid hormone receptor; or a dopamine beta-hydroxylase promoter. In additional examples, the promoter is a tumor-specific promoter. In such examples, for example, episomal replication occurs specifically in a tumor cell and not in a normal cell. For example, the tumor-specific promoter is a cell-cycle dependent promoter, such as an E2F responsive promoter, for example, an E2F responsive promoter that is a TATA-less promoter. In particular examples, the promoter is cycA, cdc2, cdc25, B-myb, E2F-1, p107, HsOrc1, or adenoE1A. In examples, the cell-cycle dependent promoter contains a CAT (CCAAT; SEQ ID NO:509) motif, for example, the promoter is a cdc25, cyclin B1, cyclin B2, Cdc2, topoisomerase IIa or E2F-1. In particular examples, the promoter is an E2F-1 promoter containing the sequence of nucleotides set forth as nucleotides 37 to 303 of SEQ ID NO:506, as nucleotides 1194 to 1460 of SEQ ID NO: 483 or nucleotides set forth in SEQ ID NO:534 or 535 or a variant sequence thereof that exhibits at least 80% sequence identity thereto. For example, the sequence exhibits at least 85%, 86%, 87%, 88%, 89%, 90%, 91%, 92%, 93%, 94%, 95%, 96%, 97%, 98% or 99% sequence identity to the sequence of nucleotides set forth as nucleotides 37 to 303 of SEQ ID NO:506, as nucleotides 1194 to 1460 of SEQ ID NO: 483 or nucleotides set forth in SEQ ID NO:534 or 535.

[0021] In examples of non-viral nucleic acid vectors provided herein, including non-viral oncovectors, the promoter can be modified by nucleotide changes, truncations, deletions, or insertions. For example, the promoter can be modified to remove CpG motifs. In other examples, the promoter is modified by deletion or truncation of nucleotides to reduce the promoter strength, to enhance the promoter strength, to reduce expression levels of the encoded protein or to increase expression levels of the encoded protein. For example, the promoter can be modified by addition or insertion of an enhancer element. The enhancer element can be an SP-1, CAT box or cycle genes homology region (CHR) element. In particular examples, the promoter is an E2F-1 promoter containing the sequence of nucleotides set forth in any of SEQ ID NOS:536-541 or a variant sequence thereof that exhibits at least 80% sequence identity thereto. For example, in some embodiments, the sequence exhibits at least 85%, 86%, 87%, 88%, 89%, 90%, 91%, 92%, 93%, 94%, 95%, 96%, 97%, 98% or 99% sequence identity to any of SEQ ID NOS:536-541.

[0022] In examples of any of the non-viral nucleic acid vectors provided herein, including non-viral oncovectors, the vector can further contain an open reading frame coding for a second bystander product other than the encoded fusogenic protein. For example, the vector can include an open reading frame coding for a bystander protein that is a prodrug modifying protein. The encoded prodrug modifying protein is herpes simplex 1 thymidine kinase gene (HSV-TK), cytosine deaminase (CD) or cytochrome p450. In such examples, the encoded prodrug modifying protein has the sequence of amino acids set forth in SEQ ID NO:501 or SEQ ID NO:502 or a variant sequence thereof that exhibits at least 80% sequence identity to SEQ ID NO:501 or 502. In other examples, the open reading frame codes for a prodrug modifying protein having the sequence of nucleotides set forth in SEQ ID NO: 498 or 500 or a variant sequence thereof that exhibits at least 80% sequence identity to SEQ ID NO: 498 or 500. For example, in some embodiments, the sequence exhibits at least 85%, 86%, 87%, 88%, 89%, 90%, 91%, 92%, 93%, 94%, 95%, 96%, 97%, 98% or 99% sequence identity to SEQ ID NO:498 or 500. In any of the examples of a prodrug modifying protein, the open reading frame coding for a bystander protein is modified to remove CpG motifs and/or is humanized. For example, the open reading frame coding for a prodrug modifying protein can have the sequence of nucleotides set forth in SEQ ID NO:499 or a variant sequence thereof that exhibits at least 80% sequence identity to SEQ ID NO:499. For example, in some embodiments, the sequence exhibits at least 85%, 86%, 87%, 88%, 89%, 90%, 91%, 92%, 93%, 94%, 95%, 96%, 97%, 98% or 99% sequence identity to SEQ ID NO:499. In examples of a nonviral vector provided herein containing a further open reading frame coding for a bystander product other than the encoded fusogenic protein, the nucleic acid molecule contains at least one promoter that is operatively linked to control expression of the first open reading frame, second open reading frame and/or the open reading frame coding for a second bystander product.

[0023] In examples of any of the non-viral nucleic acid vectors provided herein, including non-viral oncovectors, the vector can further contain an open reading frame coding for an adjunct therapy protein. The adjunct therapy protein can be a protein that induces apoptosis, a toxin, a prodrug modifying protein, a protein that interferes with a signal transduction cascade involved with cellular survival or proliferation, an immunomodulatory protein and an angiogenesis inhibitor. For example, the encoded adjunct therapy protein can be a cytokine or a chemokine. In examples of a nonviral vector provided herein containing a further open reading frame coding for a adjunct therapy protein, the nucleic acid molecule contains at least one promoter that is operatively linked to control expression of the first open reading frame, second open reading frame and/or the open reading frame coding for an adjunct therapy protein.

[0024] In examples of non-viral nucleic acid vectors provided herein, including non-viral nucleic acid vectors, the vector can contain an open reading frame coding for a reporter protein. The reporter protein can be a detectable protein, a protein capable of detection or a selectable marker. For example, the reporter protein can be chloramphenicol acetyl transferase (CAT), β-galactosidase, luciferase, alkaline phosphatase, a fluorescent protein, and horse radish peroxidase, an antibiotic resistance marker. In particular examples, the reporter protein is a green fluorescent protein (GFP), red fluorescent protein (RFP) luciferase or mKate. In examples of a nonviral vector provided herein containing a further open reading frame coding for a reporter protein, the nucleic acid molecule contains at least one promoter that is operatively linked to control expression of the first open reading frame, second open reading frame and/or the open reading frame coding for a reporter protein.

[0025] In any of the examples of a non-viral nucleic acid vector provided herein, the entire nucleic acid is modified to remove CpG motifs and/or is humanized. In other examples herein, the first and/or second open reading frame, or any of the further open reading frames, is operatively linked to one or more regulatory elements to control expression of the gene. For example, the regulatory element is a polyadenylation signal or an internal promoter.

[0026] In particular examples of non-viral nucleic acid vectors provided herein, including non-viral oncovectors, the vector contains: a) a promoter that controls expression of the first and second open-reading frame; b) a first open reading frame coding for a fusogenic protein or variant thereof that exhibits fusogenic activity; c) an IRES; d) a second open reading frame coding for a replication initiator or variant thereof that is capable of initiating episomal replication; and e) an origin of replication or variant thereof that effects replication. In such an example, the first open reading frame is positioned before the second open reading frame in the nucleic acid molecule. In other examples, the second open reading frame is positioned before the first open reading frame in the nucleic acid molecule.

[0027] Provided herein is a non-viral nucleic acid vector that has the sequence of nucleotides set forth in SEQ ID NO: 647, 649, 651, 653, 655, 657, 659-663, 693, 700-705, 722 and 727 or a sequence of nucleotides that exhibits at least 80% sequence identity to any of SEQ ID NO: 647, 649, 651, 653, 655, 657, 659-663, 693, 700-705, 722 and 727. For example, in some embodiments, the sequence of nucleotides exhibits at least 85%, 86%, 87%, 88%, 89%, 90%, 91%, 92%, 93%, 94%, 95%, 96%, 97%, 98% or 99% sequence identity to any of SEQ ID NO: 647, 649, 651, 653, 655, 657, 659-663, 693, 700-705, 722 and 727. Also provided herein is a non-viral nucleic acid vector that has the sequence of nucleotides set forth in SEQ ID NO:664 or 724, or a sequence of nucleotides that exhibits at least 80% sequence identity to SEQ ID NO:664 or 724. For example, in some embodiments, the sequence of nucleotides exhibits at least 85%, 86%, 87%, 88%, 89%, 90%, 91%, 92%, 93%, 94%, 95%, 96%, 97%, 98% or 99% sequence identity to SEQ ID NO:664 or 724.

[0028] In any of the examples provided herein, the non-viral nucleic acid vector is provided as a naked DNA.

[0029] Provided herein is a nanoparticle, containing any of the non-viral nucleic acid vectors provided herein, including any of the non-viral nucleic acid vectors. The nanoparticles provided herein include those that are based on polyethylenimine (PEI) polymers, polypropylenimine dendrimers PPIG3 polymers, B-amino-ester polymers, liposome formulations, or sugar molecules such as cyclodextrin polymers. For example, the nanoparticle is a liposome formulation. Also provided herein is a liposome containing any of the non-viral nucleic acid vectors provided herein, including any of the non-viral nucleic acid vectors. Any of the nanoparticles or liposomes provided herein can be conjugated to a protein that targets a tumor. For example, a protein that targets a tumor can be transferrin, an arginine-glycine-aspartate (RGD) peptide, an αvβ3 binding targeting peptide, folate or an antibody targeting a protein expressed or overexpressed on the surface of a tumor cell.

[0030] Provided herein is a combination containing any of the non-viral nucleic acid vectors provided herein, including non-viral oncovectors, or a nanoparticle or liposome thereof, and a hyaluronidase protein.

[0031] Provided herein is a method of treating cancer by administering any one of the non-viral nucleic acid vectors provided herein, nanoparticles or liposomes containing such vectors, or combination containing any of the vectors to a subject that has cancer. The cancer can be a sarcoma, mesothelioma, carcinoid, melanoma, neuroblastoma, retinoblastoma, osteosarcoma, or cancers of the lung, colon, esophagus, ovary, pancreas, skin, stomach, head and neck, bladder, prostate, liver, brain, adrenal gland, breast, endometrium, kidney, thyroid, parathyroid, cervix, bone, eye or hematological system. The methods provided herein can further include treating the subject by a targeted therapy, chemotherapy, radiotherapy, immunotherapy, hormonal therapy, cryotherapy or surgery.

[0032] Provided herein is a pharmaceutical composition for use in treating a cancer containing any of the non-viral nucleic acid vectors provided herein, nanoparticles or liposomes containing any of the non-viral nucleic acid vectors. Also provided herein is a pharmaceutical composition containing any of the combinations provided here for use in treating cancer. The compositions provided herein can be formulated as a medicament for treating cancer.

### BRIEF DESCRIPTION OF THE FIGURES

[0033] FIGS. 1A-F depict the fusogenic properties of the oncovectors described herein, including the tumor-specific replication and expression of fusogenic proteins encoded thereon, to selectively elicit oncolysis.

[0034] FIGS. 2A-H depict the evolution of an exemplary oncovector construct using schematic BspHI-linearized vector maps. Highlighted features are presented in boxes, which can be interchanged following digestion and ligation at the indicated restriction sites. FIG. 2A depicts features of the starting vector, pIRES2-EGFP (SEQ ID NO: 1). FIG. 2B depicts a modified starting vector wherein the gene encoding EGFP is replaced with a CpG-free, human codon-optimized gene encoding EGFP (e.g., pIRES2-zGFP; SEQ ID NO: 694). FIG. 2C depicts the modified vector presented in FIG. 2B with a nucleotide sequence encoding SV40 TAg, inserted between the NheI and BamHI restriction sites, for use as a vector to test autonomous replication (e.g., pC-T-I-zGFP; SEQ ID NO: 697). FIG. 2D depicts the modified test vector presented in FIG. 2C with a nucleotide sequence encoding a fusogenic protein, inserted between the NheI and BamHI restriction sites, for use as a vector to test fusogenic activity (e.g., pC-zGALV-IzG; SEQ ID NO: 713). FIG. 2E depicts the modified test vector presented in FIG. 2C with a cell cycle-dependent promoter (CCD) replacing the CMV promoter between the AseI and NheI restriction sites for use as a vector to test cell type selectivity of autonomous replication (e.g., pCMV/EF1-zGFP-I-T-BB3; SEQ ID NO: 666). FIG. 2F depicts the modified test vector presented in FIG. 2E with a nucleotide sequence encoding a fusogenic protein inserted between the NheI and BamHI restriction sites for use as a vector to test cell type-specific fusogenic activity. FIG. 2G depicts an oncovector derived from the test vector presented in FIG. 2F, wherein the nucleotide sequence for the fusogenic protein exhibiting the best fusogenic activity is present between the NheI and BamHI restriction sites (first position) and the nucleotide sequence encoding the SV40 TAg protein conferring the best replicative activity is inserted between the BstXI and Not I restriction sites (second position). FIG. 2H depicts a combinatorial oncovector derived from the vector presented in FIG. 2G, wherein a nucleotide sequence corresponding to an adjunct therapy gene, such as a prodrug modifying enzyme (e.g. cytosine deaminase), is inserted in a location isolated from the bicistronic sequence, for example between the Pf1FI and Bg1II restriction sites (third position).

[0035] FIGS. 3A-L depict plasmid maps for exemplary backbone and intermediate constructs and experimental vectors. FIG. 3A depicts Intermediate Vector 1 (SEQ ID NO: 2). FIG. 3B depicts Intermediate Vector 2 (SEQ ID NO: 3). FIG. 3C depicts Intermediate Vector 3 (SEQ ID NO: 4). FIG. 3D depicts Intermediate Vector 4 (SEQ ID NO: 5). FIG. 3E depicts an exemplary test vector derived from Intermediate Vector 4 with mammalian cell replication and expression capabilities. FIG. 3F depicts an exemplary test vector derived from Intermediate Vector 4 with tumor cell-specific replication and expression capabilities. FIG. 3G depicts an exemplary test vector (pCzGFP-I-T-BB3; SEQ ID NO: 607) derived from BB3 backbone. FIG. 3H depicts an exemplary replication-deficient test vector (pCzGFP-I-T-dSV; SEQ ID NO: 608) derived from BB3 backbone. FIG. 3I depicts an exemplary test vector (pCzGFP-I-T-BB4; SEQ ID NO: 719) derived from BB4 backbone. FIG. 3J depicts an exemplary replication-deficient test vector (pCzGFP-I-T-dSV4-1; SEQ ID NO: 720) derived from BB4 backbone. FIG. 3K depicts an exemplary test vector (pCzGFP-I-T-BB5; SEQ ID NO: 726) derived from BB5 backbone. FIG. 3L depicts an exemplary test vector, expressing an exemplary fusogenic protein (pCzGALV-I-T-BB3; SEQ ID NO: 653) derived from BB3 backbone.

[0036] FIGS. 4A-F illustrate the process of overlap extension polymerase chain reaction to construct an exemplary gene.

### DETAILED DESCRIPTION

### Outline

[0037] A. Definitions

[0038] B. Overview of the Oncovector System

[0039] C. Components of the Oncovector System and Resulting Oncovectors
[0040] 1 Replication Unit
   [0041] a. SV40 Origin and Mutants Thereof
   [0042] b. SV40 T Antigen and Mutants Thereof
[0043] 2. Therapeutic Genes
   [0044] a. Gene Encoding a Fusogenic Protein
      [0045] i. Exemplary Viral Fusogenic F Proteins and Variants
   [0046] b. Gene encoding a Prodrug Converting Enzyme
[0047] 3. Promoter
   [0048] a. Cell-cycle Dependent Promoters
[0049] 4. Other Elements
   [0050] a. Regulatory Elements
      [0051] i. IRES
      [0052] ii. Polyadenylation Signal
   [0053] b. Reporter Genes
   [0054] c. Adjunct Therapy Proteins
      [0055] i. Suicide Genes
      [0056] ii. Immunomodulatory Proteins
      [0057] iii. Angiogenesis Inhibitors
[0058] 5. Modification of Components
[0059] 6. Exemplary Oncovector Constructs

[0060] D. Methods of Designing Oncovector Constructs
[0061] 1. Backbone Constructs
[0062] 2. Experimental Test Vector Backbones
   [0063] a. Replication Competent Vector
   [0064] b. Fusogenic Competent Vector
   [0065] c. Tissue or Cell Specificity/Selectivity Competent Vector
[0066] 3. Integration of Constructs to Generate an Oncovector

[0067] E. Methods of Producing Oncovector Constructs
[0068] 1. Synthetic Genes and Peptides
[0069] 2. Methods of Cloning and Isolating Component Genes
[0070] 3. Methods of Generating and Cloning Constructs

[0071] F. Assays to Assess or Monitor Activities of Oncovector Constructs
[0072] 1. Replication Assays
   [0073] a. Incorporation of detectable nucleoside and/or nucleotide analogs
   [0074] b. Real-time polymerase chain reaction (qPCR)
   [0075] c. Southern Blot Analysis
   [0076] d. DpnI digestion
   [0077] e. Binding of SV-T to SV40 origin of replication
[0078] 2. Cell Fusion Assays
   [0079] a. Fluorescence dequenching
   [0080] b. Dye Transfer
   [0081] c. Content mixing
   [0082] d. Syncytium formation
[0083] 3. Assays for Transformation of Normal Cells to Cancerous Cells
   [0084] a. Immortalization
   [0085] b. Growth in low serum
   [0086] c. Saturation density
   [0087] d. Focus formation
   [0088] e. Overcoming growth-inhibition of tumor suppressors
   [0089] f. Activation of cyclin A
   [0090] g. Anchorage independence
   [0091] h. Formation of tumors in animals
   [0092] i. Binding of SV-T to Tumor Suppressor Proteins
[0093] 4. Expression Assays
[0094] 5. Immunogenicity Assays
[0095] 6. Animal Models

[0096] G. Preparation, Formulation and Administration of Oncovector Constructs and Oncovector Construct Compositions
[0097] Exemplary Delivery Methods

[0098] H. Exemplary Methods of Treatment
[0099] 1. Cancers
   [0100] a. Lung Cancer
   [0101] b. Colorectal Cancer
   [0102] c. Bladder Cancer
   [0103] d. Ovarian Cancer
   [0104] e. Skin Cancer
   [0105] f. Prostate Cancer
   [0106] g. Breast Cancer
[0107] 2. Selection of the Components of an Oncovector Construct for Treatment
[0108] 3. Combination Therapies

[0109] I. Examples

### A. DEFINITIONS

[0110] Unless defined otherwise, all technical and scientific terms used herein have the same meaning as is commonly understood by one of skill in the art to which the invention(s) belong. All patents, patent applications, published applications and publications, Genbank sequences, databases, websites and other published materials referred to throughout the entire disclosure herein, unless noted otherwise, are incorporated by reference in their entirety. In the event that there are a plurality of definitions for terms herein, those in this section prevail. Where reference is made to a URL or other such identifier or address, it understood that such identifiers can change and particular information on the internet can come and go, but equivalent information can be found by searching the internet. Reference thereto evidences the availability and public dissemination of such information.

[0111] As used herein, self-replication refers to a plasmid which contains all components to allow for its own amplification (i.e. an origin and a gene expressing a replication initiator).

[0112] As used herein, episomal or extrachromosomal replication refers to amplification or replication of plasmid sequences without prior integration of these plasmid sequences into the mammalian genome, i.e. without integration into a chromosome.

[0113] As used herein, “autonomous replication” with reference to a nucleic acid molecule, such as an autonomously replicating plasmid (ARP), refers to a nucleic acid molecule or plasmid that is capable of self-replication that is episomal or extrachromosomal.

[0114] As used herein, nucleic acid molecule refers to single-stranded and/or double-stranded polynucleotides, such as deoxyribonucleic acid (DNA) and ribonucleic acid (RNA), as well as analogs or derivatives of either RNA or DNA. Also included in the term “nucleic acid” are analogs of nucleic acids such as peptide nucleic acid (PNA), phosphorothioate DNA, and other such analogs and derivatives. Nucleic acids can encode gene products, such as, for example, polypeptides, regulatory RNAs, microRNAs, siRNAs and functional RNAs. Hence, nucleic acid molecule is meant to include all types and sizes of DNA molecules including siRNA, aptamers, ribozymes, cDNA, plasmids and DNA including modified nucleotides and nucleotide analogs.

[0115] As used herein, a construct refers to a piece of circular double-stranded DNA, such as a vector or plasmid.

[0116] As used herein, “plasmid” or “vector” is used interchangeably and is meant a circular DNA vector. Plasmids contain an origin of replication that allows many copies of the plasmid to be produced in a bacterial or eukaryotic cell without integration of the plasmid into the host cell DNA.

[0117] As used herein, a non-viral nucleic acid vector refers to a nucleic acid molecule that contains an origin of replication and other elements for replication of the nucleic acid (i.e. it is capable of autonomous replication), which can be of viral origin, but does not include all of the requisite elements that result in a viral particle, such as elements for viral replication, packaging and/or expression. Such elements include, but are not limited to, one or more of the nucleic acid molecules encoding a capsid protein or coat protein, a packaging signal, an early promoter and regulators of late viral gene expression. Hence, for example, a non-viral nucleic acid vector is not packaged as a viral vector particle.

[0118] As used herein, an “oncovector” is a non-viral nucleic acid vector that contains an element or elements such that the vector preferentially replicates in tumors but not in normal tissue. Hence, the oncovector is an autonomously replicating plasmid (ARP) in tumor cells.

[0119] As used herein, the term “gene” refers to any and all discrete coding regions of a host genome, or regions that code for a functional RNA only (e.g., tRNA, rRNA, regulatory RNAs such as ribozymes etc) as well as associated non-coding regions and optionally regulatory regions. In certain embodiments, the term “gene” includes within its scope the open reading frame encoding specific polypeptides, introns, and adjacent 5′ and 3′ non-coding nucleotide sequences involved in the regulation of expression. In this regard, the gene can further contain control signals such as promoters, enhancers, termination and/or polyadenylation signals that are naturally associated with a given gene, or heterologous control signals. The gene sequences can be cDNA or genomic DNA or a fragment thereof. The gene can be introduced into an appropriate vector for extrachromosomal maintenance or for integration into the host.

[0120] As used herein, “open reading frame” (ORF) refers to a DNA sequence starting with a start codon and ending with a stop codon, and therefore signaling a coding sequence that is translated into a functional product RNA or polypeptide. Hence, an ORF is synonymous with coding sequence.

[0121] As used herein, a “DNA transcription unit” or “transcription unit” refers to nucleic acid molecule encoding a protein that contains not only the open reading frame (ORF) that is directly translated into the protein (the coding sequence), but also can include regulatory sequences that direct and regulate the synthesis of the protein. The regulatory sequences before (upstream from) the coding sequence is called the five prime (5′) untranslated region (5′UTR) and the sequence following (downstream from) the coding sequence is called the three prime (3′) untranslated region (3′UTR). For example, the 3′ untranslated region can include a polyadenylation site.

[0122] As used herein, an “expression cassette” refers to one or more genes and the sequences controlling their expression. Typically, an expression cassette includes a promoter sequence, an open reading frame and a 3′ untranslated region that, in eukaryotes, usually contains a polyadenylation signal.

[0123] As used herein, “replication competent” with reference to a plasmid means that a nucleic acid molecule or plasmid contains the minimal components required for autonomous replication. For purposes herein, a nucleic acid molecule is replication competent if it minimally contains an origin of replication that can be initiated upon binding of a cognate or compatible replication initiator. Generally, a nucleic acid molecule is replication competent if it contains a complete replication unit containing both the origin of replication and an open reading frame coding for expression of a cognate or compatible replication initiator.

[0124] As used herein, “non-replicating” or “replication-deficient” with reference to a nucleic acid molecule or plasmid refers to a nucleic acid molecule that is not capable of autonomous replication. For example, a non-replicating nucleic acid molecule is one that does not contain an origin of replication.

[0125] As used herein, a “replication unit” refers to the portions of a DNA molecule or molecule(s) that are capable of conferring independent replication of one of the molecules. For example, a replication unit confers extrachromosomal or episomal replication of a DNA molecule. The replication unit can be on the same DNA molecule or on separate DNA molecules. For purposes herein, a replication unit is generally derived from a virus system. A replication unit typically minimally contains an origin of replication and a compatible or cognate replication initiator to activate the origin.

[0126] As used herein, an origin of replication (origin) refers to a particular sequence of DNA that is required for replication to begin and at which DNA replication is initiated on a plasmid, virus or chromosome. For purposes herein, an origin of replication includes any origin, and typically any viral origin such as any polyomavirus origin, that can drive episomal replication in eukaryotic cells, such as mammalian cells or human cells. Exemplary of origins include, but are not limited to, origins from SV40, BKV, JC virus, lymphotropic papovavirus, and simian agent 12. An origin of replication also includes any sequence variant that exhibits a difference in its nucleotide sequence (e.g. due to nucleotide substitution or insertion, truncation or deletion or addition of nucleotides), but that is still capable of initiating replication of DNA in a eukaryotic cell. For example, an origin of replication includes any containing 2, 3, 4, 5, 6, 7, 8, 9, 10 or more binding sites for a compatible or cognate replication initiator.

[0127] As used herein an SV40 origin of replication refers to an origin of replication derived from the SV40 double-stranded DNA virus, which belongs to the Polyomaviridae family. An SV40 origin of replication contains four binding sites for its cognate replication initiator, SV40 large T antigen, arranged in a palindromic pattern containing two GAGGC motifs and two CTCCG antisense motifs (SEQ ID NO:123). Reference to an SV40 origin of replication also includes any sequence variant that exhibits a difference in its nucleotide sequence (e.g. due to nucleotide substitution or insertion, truncation or deletion or addition of nucleotides), but that is still capable of initiating replication of DNA in a eukaryotic cell in the presence of a replication initiator. For example, an SV40 origin of replication variants includes any that exhibits at least 60%, 70%, 75%, 80%, 85%, 86%, 87%, 88%, 89%, 90%, 91%, 92%, 93%, 94%, 95%, 96%, 97%, 98%, 99% or more sequence identity to the sequence of nucleotides set forth in SEQ ID NO:123, and is capable of initiating replication of DNA in a eukaryotic cell in the presence of a replication initiator. For example, an SV40 origin of replication includes any containing 2, 3, 4, 5, 6, 7, 8, 9, 10 or more binding sites for a compatible or cognate replication initiator (see e.g. SEQ ID NO:37, 79, 113, or 124).

[0128] As used herein, a replication initiator refers to an encoded protein that can bind to a site or region of the origin of replication to initiate DNA replication. Typically, DNA replication is initiated upon binding of the initiator and separating of the two strands of DNA to expose single-stranded DNA, e.g. due to a helicase activity of the replication initiator or other recruited protein. A replication initiator is generally compatible with and can bind to the origin of replication. Exemplary of replication initiators are any that are virally-derived, such as from a polyomavirus. For example, a replication initiator includes, but is not limited to, large T antigen for SV40 (SV40 TAg), polyoma and BKV, and EBNA for EBV. Reference to a variant of a replication initiator refers to any encoded sequence variant that exhibits a difference in its amino acid sequence (e.g. due to amino acid substitution or insertion, truncation or deletion or additions), but that is still capable of binding to an origin of replication to initiate replication of DNA in a eukaryotic cell.

[0129] As used herein, SV40 large T Antigen (SV40 T Ag) refers to a replication initiator derived from the SV40 double-stranded DNA virus, and which can bind to the SV40 origin of replication. The SV40 TAg has the sequence of amino acids set forth in SEQ ID NO:564 and is encoded by a sequence of nucleotides set forth in SEQ ID NO:561. Reference to a variant of an SV40 large T antigen (or encoding nucleic acid molecule) refers to any that exhibits a difference in its sequence (e.g. due to nucleotide or amino acid substitutions or insertions, truncation or deletions or additions), but that is still capable of binding to (or encodes a protein that is still capable of binding to) an SV40 origin or replication or other compatible origin of replication to initiate replication of DNA in a eukaryotic cell. For example, an SV40 TAg variants includes any that exhibits at least 60%, 70%, 75%, 80%, 85%, 86%, 87%, 88%, 89%, 90%, 91%, 92%, 93%, 94%, 95%, 96%, 97%, 98%, 99% or more sequence identity to the sequence of nucleotides set forth in SEQ ID NO:561 or degenerate codons thereof, and is capable of encoding a protein that binds an SV40 origin or replication or other compatible origin of replication to initiate replication of DNA in a eukaryotic cell. For example, an exemplary SV40 TAg replication initiator is encoded by the sequence of nucleotides set forth in SEQ ID NO:562 or 563. An SV40 TAg variant also includes any that exhibits at least 60%, 70%, 75%, 80%, 85%, 86%, 87%, 88%, 89%, 90%, 91%, 92%, 93%, 94%, 95%, 96%, 97%, 98%, 99% or more sequence identity to the sequence of amino acids set forth in SEQ ID NO:564, and is capable of binding an SV40 origin or replication or other compatible origin of replication to initiate replication of DNA in a eukaryotic cell. For example, an exemplary SV40 TAg variant replication initiator has the sequence of amino acids set forth in SEQ ID NO:565-604.

[0130] As used herein, binding with reference to binding of a replication initiator (e.g. SV40 TAg) and origin of replication (e.g. SV40 origin) refers to specific binding to the origin of replication. For example, specific binding can be determined using an immunoprecipitation assay and analysis by electrophoresis and autoradiography (see e.g. Cole et al. (1986), J. Virol. 57(2):539-546; Scheller et al. (1982) Cell, 29:375-383). For example, nuclear extracts from cells expressing SV40 TAg (e.g., cells genetically modified with an expression construct that encodes SV40 TAg, such that SV40 TAg is expressed in the cells) can be obtained and incubated with radiolabeled SV40 DNA fragments (e.g. for 1 hour at 4° C.) Anti-SV40 Tag antibody or tumor antiserum can be added (e.g. for an additional 30 minutes). The material can be precipitated, immune complexes isolated by centrifugation and bound DNA dissociated therefrom and analyzed by electrophoresis. Such binding assays are well-known to one of skill in the art.

[0131] As used herein, the term “accumulate” refers to building up of plasmid or gene product expressed from the plasmid (after replication).

[0132] As used herein, “compatible” with reference to a replication initiator and origin refers to those pairs of origin/initiator that are able to support replication.

[0133] As used herein, “cognate” with reference to a replication initiator and origin refers to those pairs of origin/initiator that are derived from the same virus.

[0134] As used herein, “promoter” refers to a DNA region that controls initiation and rate of transcription. It can contain genetic elements capable of binding regulatory proteins and other molecules, such as RNA polymerase and other transcription factors. Promoter sequences are commonly, but not always, found in the 5′ non-coding region of genes. A promoter can be functional in a variety of tissue types and in several different species, or its function can be restricted to a particular species and/or a particular tissue or cell type. Further, a promoter can be constitutively active, or it can be selectively activated by certain substances (e.g., a tissue-specific factor), under certain conditions (e.g., tumor cell), or during certain developmental stages of the organism (e.g., active in fetus, silent in adult).

[0135] As used herein, “tissue-specific” or “cell-specific” promoter refers to a promoter that is capable of driving transcription of a gene in a particular tissue (e.g., lung, liver, breast, or others) or cell (e.g., leukocyte, myocyte, tumor cell, or others) while remaining largely “silent” or expressed at relatively low levels in other tissue or cell types. A tissue-specific or cell-specific promoter can be selective for any tissue or cell-type in a subject. Such promoters are known to one of skill in the art and are described herein. Exemplary of tissue-specific or cell-specific promoters are tumor-specific promoters. It is understood, however, that tissue-specific or cell-specific promoters can have a detectable amount of “background” or “base” activity in those tissues or cells where they are silent. Generally, the promoter is active to a greater degree in a predetermined target cell or tissue as compared to other cells or tissues. For example, the promoter has about or 2, 3, 4, 5, 6, 7, 8, 9, 10, 20, 30, 40, 50, 60, 70, 80, 90, 100, 200, 300, 400, 500, 600, 700, 800, 900 or more activity, i.e. ability to express a nucleic acid sequence operatively linked thereto, in a predetermined tissue or cell than in other tissue or cell types. Thus, a tissue-specific or cell-specific promoter that exhibits some low level activity, e.g., at or about 10% or less in another cell type is still considered to be a tissue-specific or cell-specific promoter if its activity is greater than the activity in a predetermined tissue or cell.

[0136] As used herein, a “tumor cell” or “cancer cell” refers to cells that divides and reproduces abnormally because growth and division is not regulated or controlled, i.e. cells that are susceptible to uncontrolled growth. A tumor cell can be a benign or malignant cell. Typically, the tumor cell is a malignant cell that can spread to other parts of the body, a process known as metastasis.

[0137] As used herein, a “tumor-specific” promoter is a promoter that is capable of driving transcription of a gene in a tumor cell, while remaining largely “silent” or expressed at relatively low levels in other tissue or cell types, such as for example, in normal cells. For example, a tumor-specific promoter has about 2-fold or 3, 4, 5, 6, 7, 8, 9, 10, 20, 30, 40, 50, 60, 70, 80, 90, 100, 200, 300, 400, 500, 600, 700, 800, or 900-fold or greater than 900-fold, higher activity, i.e. ability to express a nucleic acid sequence operatively linked thereto, in a tumor cell than in a normal cell.

[0138] As used herein, the phrases “operatively positioned,” “operatively linked,” “under control,” and “under transcriptional control” mean that a promoter is in a correct functional location and orientation in relation to a nucleic acid sequence to control transcriptional initiation and expression of that sequence.

[0139] As used herein, “endogenous” with respect to a promoter refers to a promoter that is naturally associated with a gene or sequence, as may be obtained by isolating a portion of the 5′ non-coding sequences located upstream of the coding segment or exon.

[0140] As used herein, “heterologous” with respect to a promoter refers to a promoter that is not normally associated with a nucleic acid sequence in its natural environment.

[0141] As used herein, “multicistronic” refers to a transcript with the potential to code for more than one final product.

[0142] As used herein, “bicistronic” refers to a transcript with the potential to code for two final products.

[0143] As used herein, an “internal ribosome entry site” (IRES) refers to a nucleotide sequence that allows for translation initiation in the middle of a messenger RNA (mRNA) sequence as part of protein synthesis.

[0144] As used herein, reference to an IRES-based vector, such as an IRES-based bicistronic vector, refers to a vector that permits the coordinated co-expression of two or more genes using the same promoter in a single nucleic acid molecule vector.

[0145] As used herein, a “therapeutic gene” is a gene that encodes a therapeutic product or is capable of producing a therapeutic effect. The product can be nucleic acid, such as a regulatory sequence or gene, or can encode a protein that has a therapeutic activity or effect.

[0146] As used herein, “activity” refers to a functional activity or activities of a polypeptide or portion thereof associated with a full-length (complete) protein. Functional activities include, but are not limited to, biological activity, catalytic or enzymatic activity, antigenicity (ability to bind or compete with a polypeptide for binding to an anti-polypeptide antibody), immunogenicity, ability to form multimers, and the ability to specifically bind to a receptor or ligand for the polypeptide.

[0147] As used herein, a “bystander gene” refers to a gene that when expressed produces a protein that causes a bystander effect on adjacent tumor cells. A bystander gene can induce toxicity in the cells in which they are expressed and is also capable of inducing cytotoxicity in neighboring cells. Bystander genes include genes that, when expressed, induce cytotoxicity in targeted and neighboring cells by fusion or drug toxicity. Exemplary bystander genes include fusogenic genes and pro-drug converting enzymes.

[0148] As used herein, “bystander effect” with reference to tumor therapy refers to secondary effects on adjacent tumor cells and tissues triggered by treatment of a primary target tumor cell with a therapeutic agent. With reference to tumor therapy, the bystander effect can be of known or unknown origin and can be evoked by some forms of gene therapy in which a treatment kills more tumor cells than can be accounted for by the number of cells actually expressing an expressed tumor therapy gene. Exemplary bystander effects are caused by bystander genes that induce toxicity to targeted cells and neighboring cells via fusion or drug toxicity. For example, expression of the prodrug modifying gene HSV-TK is associated with bystander effects, since HSV-TK cells sensitive to ganciclovir (GSV) can be toxic to nearby tumor cells resistant to GSV (Freeman et al. (1993) Cancer Research, 53:5274-5283). Also, bystander effects also are achieved by bystander genes that produce fusogenic proteins.

[0149] As used herein, a “fusogenic” protein refers to a protein that effects cell-cell fusion. A fusogenic protein is generally a protein that is normally expressed by a virion to fuse with cell membranes. For purposes herein, the fusogenic protein is encoded by a gene that is synthetically or recombinantly generated based on sequences of known virion fusion proteins. Exemplary fusogenic proteins are described herein and include, for example, influenza fusion peptide for release of the viral genome, HIV gp41 fusion peptide that is responsible for clustering of helper T-cells via cell to cell fusion and the GALV fusogenic protein from Gibbon Ape Leukemia Virus that causes cell to cell fusion and syncytia formation. Exemplary fusogenic proteins include any that have a sequence of amino acids set forth in any of SEQ ID NOS: 38-44, 52, 53-58 or any that are encoded by a sequence of nucleotides set forth in any of SEQ ID NOS: 6, 8, 10, 12, 14, 15, 17, 26-35, or degenerates thereof. Reference to a variant of a fusogenic protein (or encoding nucleic acid molecule) refers to any that exhibits a difference in its sequence (e.g. due to nucleotide or amino acid substitutions or insertions, truncation or deletions or additions), and exhibits or retains fusogenic activity (or encodes a protein that exhibits or retains fusogenic activity). For example, a fusogenic protein variant includes any that exhibits at least 60%, 70%, 75%, 80%, 85%, 86%, 87%, 88%, 89%, 90%, 91%, 92%, 93%, 94%, 95%, 96%, 97%, 98%, 99% or more sequence identity to the sequence of nucleotides set forth in any of SEQ ID NO: 6, 8, 10, 12, 14, 15, 17, 26-35 or degenerate codons thereof, and exhibits fusogenic activity. For example, an exemplary fusogenic protein that is modified is encoded by a sequence of nucleotides set forth in SEQ ID NO:7, 9, 11, 13, 16, 18 or 36 or degenerate codons thereof. Fusogenic protein variants also include any that exhibit at least 60%, 70%, 75%, 80%, 85%, 86%, 87%, 88%, 89%, 90%, 91%, 92%, 93%, 94%, 95%, 96%, 97%, 98%, 99% or more sequence identity to the sequence of amino acids set forth in SEQ ID NO: 38-44, 52, 53-58, and exhibits or retains fusogenic activity.

[0150] As used herein, “fusogenic activity” refers to any protein that when expressed from a cell facilitates fusion between and among neighboring cells. Fusogenic activity can be assessed or determined using cell fusion assays that are well-known to one of skill in the art. For example, exemplary of assays to assess cell fusion include, but are not limited to, visual assays for syncytium formation, qualitative or quantitative detection of syncytia (Corcoran et al. (2006), J. Biol. Chem. 281(42):31778-31789; Dupressoir et al. (2005), Proc. Natl. Acad. Sci. USA 102(3):725-730), a fluorescence dequenching assay (Bagai et al. (1996), J. Cell Biol. 135(1):73-84; Danieli et al. (1996), J. Cell Biol. 133(3):559-569), a dye transfer assay, a content mixing assay whereby aqueous contents of two different cell populations validate fusion (e.g. a cell contains a lacZ gene under the control of the T7 promoter and another cell contains bacteriophage T7 RNA polymerase). Exemplary of such assays are described herein.

[0151] As used herein, reference to an “adjunct tumor therapy gene” refers to a gene that when expressed in a tumor cell can result in therapeutic properties or activities, thereby reducing, preventing or ameliorating tumors or cancers. For example, an adjunct tumor therapy gene is one that can augment the recognition and subsequent elimination of tumor cells by effector cells or that can render a tumor cell susceptible to toxic actions of a drug. Exemplary of adjunct tumor therapy genes include, for example, cytokines, chemokines, or suicide genes.

[0152] As used herein, the term “suicide gene” refers to a gene that encodes a polypeptide that causes a cell that produces that polypeptide to die. Suicide genes include, but are not limited to, genes that induce apoptosis, toxins, prodrug modifying gene and genes that encode polypeptides that interfere with a signal transduction cascade involved with cellular survival or proliferation.

[0153] As used herein, a “prodrug modifying gene” or “prodrug modifying element” or gene encoding a “pro-drug converting enzyme,” or variations thereof refer to a suicide gene that encodes a polypeptide that converts a prodrug to a toxic compound. Exemplary of such a suicide prodrug modifying gene is herpes simplex 1 thymidine kinase gene (HSV-TK), which converts ganciclovir to a toxic nucleotide analog. Another exemplary prodrug converting enzyme is cytosine deaminase (CD) that converts non-toxic 5-fluorocytosine to 5-flurouracil, a potent chemotherapy compound. Exemplary prodrug converting enzymes include any that have the sequence of amino acids set forth in any of SEQ ID NOs: 501 or 502 or any that are encoded by a sequence of nucleotides set forth in SEQ ID NO: 498 or 500, or degenerates thereof. Reference to a variant of a prodrug converting enzyme (or encoding nucleic acid molecule) refers to any that exhibits a difference in its sequence (e.g. due to nucleotide or amino acid substitutions or insertions, truncation or deletions or additions), and exhibits or retains cytotoxic activity (or encodes a protein that exhibits or retains cytotoxic activity). For example, a prodrug converting enzyme variant includes any that exhibits at least 60%, 70%, 75%, 80%, 85%, 86%, 87%, 88%, 89%, 90%, 91%, 92%, 93%, 94%, 95%, 96%, 97%, 98%, 99% or more sequence identity to the sequence of nucleotides set forth in any of SEQ ID NO: 498 or 500 or degenerate codons thereof, and exhibits cytotoxic activity. For example, an exemplary prodrug converting enzyme variant is encoded by a sequence of nucleotides set forth in SEQ ID NO:499, or degenerate codons thereof. Prodrug converting enzyme variants also include any that exhibit at least 60%, 70%, 75%, 80%, 85%, 86%, 87%, 88%, 89%, 90%, 91%, 92%, 93%, 94%, 95%, 96%, 97%, 98%, 99% or more sequence identity to the sequence of amino acids set forth in SEQ ID NO: 501 or 502, and exhibits or retains cytotoxic activity.

[0154] As used herein, cytotoxic activity or cytotoxicity with reference to a prodrug converting enzyme or other toxin refers to the quality or property of being toxic to cells such that cells undergo necrosis or lysis, a decrease in cell viability, a decrease in cell growth and/or apoptosis. Assays to assess or measure cytotoxicity are well known to one of skill in the art and include, but are not limited to, assays that measure cell membrane integrity using a vital dye that is normally excluded from healthy cells (e.g. trypan blue or propidium iodide), an MTT (3-(4,5-dimethylthiazol-2-yl)-2,5-diphenyltetrazolium bromide) or MTS (3-(4,5-dimethylthiazol-2-yl)-5-(3-carboxymethoxyphenyl)-2-(4-sulfophenyl)-2H-tetrazolium) assay, the sulforhodamine B (SRB) assay, WST (water-soluble tetrazolium salt) assay or a clonogenic assay.

[0155] As used herein, “genetic therapy” or “gene therapy” involves the transfer of a nucleic acid molecule, such as heterologous DNA to certain cells, target cells, of a mammal, particularly a human, with a disorder or condition for which such therapy is sought. The DNA is introduced into the selected target cells in a manner such that the heterologous DNA is expressed and a therapeutic product encoded thereby is produced. Alternatively, the heterologous DNA can in some manner mediate expression of DNA that encodes the therapeutic product, it can encode a product, such as a peptide or RNA that in some manner mediates, directly or indirectly, expression of a therapeutic product. Genetic therapy also can be used to deliver nucleic acid encoding a gene product to replace a defective gene or supplement a gene product produced by the mammal or the cell in which it is introduced. The introduced nucleic acid can encode a therapeutic compound, such as a growth factor inhibitor thereof, or a tumor necrosis factor or inhibitor thereof, such as a receptor therefor, that is not normally produced in the mammalian host or that is not produced in therapeutically effective amounts or at a therapeutically useful time. The heterologous DNA encoding the therapeutic product can be modified prior to introduction into the cells of the afflicted host in order to enhance or otherwise alter the product or expression thereof.

[0156] As used herein, a detectable label or detectable moiety or reporter protein refers to an atom, molecule or composition, wherein the presence of the atom, molecule or composition can be directly or indirectly measured or otherwise capable of detection. Detectable labels, moieties or reporters can be used included in any of the constructs herein. Detectable labels, moieties or reporters include, for example, chemiluminescent moieties, bioluminescent moieties, fluorescent moieties, radionuclides, and metals. For example, detectable labels, moieties or reporters include, for example, luciferase, green fluorescent protein, red fluorescent protein, colloidal gold, iron, gadolinium, and gallium-67. Methods for detecting labels are well known in the art. Such a label can be detected, for example, by visual inspection, by fluorescence spectroscopy, by reflectance measurement, by flow cytometry, by X-rays, by a variety of magnetic resonance methods such as magnetic resonance imaging (MRI) and magnetic resonance spectroscopy (MRS). Methods of detection also include any of a variety of tomographic methods including computed tomography (CT), computed axial tomography (CAT), electron beam computed tomography (EBCT), high resolution computed tomography (HRCT), hypocycloidal tomography, positron emission tomography (PET), single-photon emission computed tomography (SPECT), spiral computed tomography, and ultrasonic tomography. Direct detection of a detectable label refers to, for example, measurement of a physical phenomenon of the detectable label itself, such as energy or particle emission or absorption of the label itself, such as by X-ray or MRI. Indirect detection refers to measurement of a physical phenomenon of an atom, molecule or composition that binds directly or indirectly to the detectable label, such as energy or particle emission or absorption, of an atom, molecule or composition that binds directly or indirectly to the detectable label. In a non-limiting example of indirect detection, a detectable label can be biotin, which can be detected by binding to avidin. Non-labeled avidin can be administered systemically to block non-specific binding, followed by systemic administration of labeled avidin. Thus, included within the scope of a detectable label or detectable moiety is a bindable label or bindable moiety, which refers to an atom, molecule or composition, wherein the presence of the atom, molecule or composition can be detected as a result of the label or moiety binding to another atom, molecule or composition.

[0157] As used herein, operably or operatively linked when referring to nucleic acid arranged with regulatory and effector sequences of nucleotides, such as promoters, enhancers, transcriptional and translational stop sites, and other signal sequences refers to the relationship between such nucleic acid, such as DNA, and such sequences of nucleotides so that they function in concert for their intended purposes, e.g., transcription initiates in the promoter and proceeds through the coding segment to the terminator. For example, operative linkage of nucleic acid to a promoter refers to the physical relationship between the DNA and the promoter such that the transcription of such DNA is initiated from the promoter by an RNA polymerase that specifically recognizes, binds to and transcribes the DNA. Thus, operatively linked or operationally associated refers to the functional relationship of a nucleic acid, such as DNA, with regulatory and effector sequences of nucleotides, such as promoters, enhancers, transcriptional and translational stop sites, and other signal sequences. In order to optimize expression and/or transcription, it can be necessary to remove, add or alter 5′ untranslated portions of the clones to eliminate extra, potentially inappropriate, alternative translation initiation (i.e., start) codons or other sequences that can interfere with or reduce expression, either at the level of transcription or translation. In addition, consensus ribosome binding sites can be inserted immediately 5′ of the start codon and can enhance expression (see, e.g., Kozak J. Biol. Chem. 266: 19867-19870 (1991) and Shine and Delgarno, Nature 254(5495):34-38 (1975)). The desirability of (or need for) such modification can be empirically determined.

[0158] The term “naked” polynucleotide, DNA or RNA, refers to sequences that are free from any delivery vehicles, complexes or agents that act to assist, promote, or facilitate entry into the cell, including viral particles, liposome formulations, lipofectin or precipitating agents.

[0159] As used herein, a “targeting molecule” or “targeting ligand” refers to any protein, polypeptide, or portion thereof that binds to a cell surface molecule, including, but not limited to, proteins, carbohydrates, lipids or other such moiety. Targeting ligands include, but are not limited to growth factors, cytokines, adhesion molecules, neuropeptides, protein hormones and single-chain antibodies (scFv).

[0160] As used herein, a nanoparticle refers to a colloidal particle for delivery of a molecule that is microscopic in size, e.g., has an average particle size of between about 1 and 1000 nanometers (nm), such as 1 and 100 nm, and that behaves as a whole unit in terms of transport and properties. Nanoparticles include monolithic nanoparticles (nanospheres) in which the molecule is absorbed, dissolved or dispersed throughout the matrix and nanocapsules in which the molecule is confined to an aqueous or oily core surrounded by a shell-like wall. Alternatively, the molecule can be covalently attached to the surface or into the matrix. Nanoparticles include, for example, liposomes, dendrimers, polymeric micelles, nanocapsules, nanospheres and solid lipid nanoparticles. Generally, nanoparticles are made from biocompatible and biodegradable materials such as natural or synthetic polymers (e.g. gelatin, albumin, polylactides, polyalkylcyanoacrylates) or solid lipids. Nanoparticles include those that contain a targeting molecule attached to the outside.

[0161] As used herein, production by recombinant means by using recombinant DNA methods means the use of the well known methods of molecular biology for expressing proteins encoded by cloned DNA.

[0162] As used herein, modification or variant is in reference to modification of a sequence of amino acids of a polypeptide or a sequence of nucleotides in a nucleic acid molecule and includes deletions, insertions, and replacements of amino acids and nucleotides, respectively. Modifications also can include post-translational modifications or other changes to the molecule that can occur due to conjugation or linkage, directly or indirectly, to another moiety. Methods of modifying a polypeptide are routine to those of skill in the art, such as by using recombinant DNA methodologies.

[0163] As used herein, “CpG motif” refers to nucleotides contains a cytosine “C” followed by a guanine “G”. When these CpG motifs are unmethylated, they can act as immunostimulants based on their recognition by immune cell receptors, such as Toll-like Receptors. Reference to “removal of CpG motifs” means that the C and/or G nucleotides are modified to remove the motif.

[0164] As used herein, “humanized” with respect to a nucleic acid molecule means that the nucleic acid molecule has a sequence or a portion of a sequence that resembles or closely resembles a human sequence or the molecule is otherwise made to be more functional in a human cell. For example, codons can be optimized for human usage based on known codon usage in humans in order to enhance the effectiveness of expression of the nucleic acid in human cells, e.g. to achieve faster translation rates and high accuracy.

[0165] As used herein, the residues of naturally occurring α-amino acids are the residues of those 20 α-amino acids found in nature which are incorporated into protein by the specific recognition of the charged tRNA molecule with its cognate mRNA codon in humans.

[0166] As used herein, nucleic acids include DNA, RNA and analogs thereof, including peptide nucleic acids (PNA) and mixtures thereof. Nucleic acids can be single or double-stranded. When referring to probes or primers, which are optionally labeled, such as with a detectable label, such as a fluorescent or radiolabel, single-stranded molecules are contemplated. Such molecules are typically of a length such that their target is statistically unique or of low copy number (typically less than 5, generally less than 3) for probing or priming a library. Generally a probe or primer contains at least 14, 16 or 30 contiguous nucleotides of sequence complementary to or identical to a gene of interest. Probes and primers can be 10, 20, 30, 50, 100 or more nucleic acids long.

[0167] As used herein, a peptide refers to a polypeptide that is from 2 to 40 amino acids in length.

[0168] As used herein, the amino acids which occur in the various sequences of amino acids provided herein are identified according to their known, three-letter or one-letter abbreviations (Table 1). The nucleotides which occur in the various nucleic acid fragments are designated with the standard single-letter designations used routinely in the art.

[0169] As used herein, an “amino acid” is an organic compound containing an amino group and a carboxylic acid group. A polypeptide contains two or more amino acids. For purposes herein, amino acids include the twenty naturally-occurring amino acids, non-natural amino acids and amino acid analogs (i.e., amino acids wherein the α-carbon has a side chain).

[0170] As used herein, “amino acid residue” refers to an amino acid formed upon chemical digestion (hydrolysis) of a polypeptide at its peptide linkages. The amino acid residues described herein are presumed to be in the “L” isomeric form. Residues in the “D” isomeric form, which are so designated, can be substituted for any L-amino acid residue as long as the desired functional property is retained by the polypeptide. NH₂ refers to the free amino group present at the amino terminus of a polypeptide. COOH refers to the free carboxy group present at the carboxyl terminus of a polypeptide. In keeping with standard polypeptide nomenclature described in J. Biol. Chem., 243: 3557-3559 (1968), and adopted 37 C.F.R. §§1.821-1.822, abbreviations for amino acid residues are shown in Table 1:

TABLE 1
Table of Correspondence

SYMBOL

| 1-Letter | 3-Letter | AMINO ACID |
|---|---|---|
| Y | Tyr | Tyrosine |
| G | Gly | Glycine |
| F | Phe | Phenylalanine |
| M | Met | Methionine |
| A | Ala | Alanine |
| S | Ser | Serine |
| I | Ile | Isoleucine |
| L | Leu | Leucine |
| T | Thr | Threonine |
| V | Val | Valine |
| P | Pro | proline |
| K | Lys | Lysine |
| H | His | Histidine |
| Q | Gln | Glutamine |
| E | Glu | glutamic acid |
| Z | Glx | Glu and/or Gln |
| W | Trp | Tryptophan |
| R | Arg | Arginine |
| D | Asp | aspartic acid |
| N | Asn | asparagine |
| B | Asx | Asn and/or Asp |
| C | Cys | Cysteine |
| X | Xaa | Unknown or other |

[0171] It should be noted that all amino acid residue sequences represented herein by formulae have a left to right orientation in the conventional direction of amino-terminus to carboxyl-terminus. In addition, the phrase “amino acid residue” is broadly defined to include the amino acids listed in the Table of Correspondence (Table 1) and modified and unusual amino acids, such as those referred to in 37 C.F.R. §§1.821-1.822, and incorporated herein by reference. Furthermore, it should be noted that a dash at the beginning or end of an amino acid residue sequence indicates a peptide bond to a further sequence of one or more amino acid residues, to an amino-terminal group such as NH₂ or to a carboxyl-terminal group such as COOH.

[0172] As used herein, “naturally occurring amino acids” refer to the 20 L-amino acids that occur in polypeptides.

[0173] As used herein, “non-natural amino acid” refers to an organic compound that has a structure similar to a natural amino acid but has been modified structurally to mimic the structure and reactivity of a natural amino acid. Non-naturally occurring amino acids thus include, for example, amino acids or analogs of amino acids other than the 20 naturally-occurring amino acids and include, but are not limited to, the D-stereoisomers of amino acids. Exemplary non-natural amino acids are described herein and are known to those of skill in the art.

[0174] As used herein, an isokinetic mixture is one in which the molar ratios of amino acids has been adjusted based on their reported reaction rates (see, e.g., Ostresh et al., (1994) Biopolymers 34:1681).

[0175] As used herein, suitable conservative substitutions of amino acids are known to those of skill in this art and can be made generally without altering the biological activity of the resulting molecule. Those of skill in this art recognize that, in general, single amino acid substitutions in non-essential regions of a polypeptide do not substantially alter biological activity (see, e.g., Watson et al. Molecular Biology of the Gene, 4th Edition, 1987, The Benjamin/Cummings Pub. co., p. 224). Such conservative amino acid substitutions can be made in accordance with those set forth in TABLE 2 as follows:

TABLE 2

| | Exemplary conservative |
|---|---|
| Original residue | substitution |
| Ala (A) | Gly; Ser |
| Arg (R) | Lys |
| Asn (N) | Gln; His |
| Cys (C) | Ser |
| Gln (Q) | Asn |
| Glu (E) | Asp |
| Gly (G) | Ala; Pro |
| His (H) | Asn; Gln |
| Ile (I) | Leu; Val |
| Leu (L) | Ile; Val |
| Lys (K) | Arg; Gln; Glu |
| Met (M) | Leu; Tyr; Ile |
| Phe (F) | Met; Leu; Tyr |
| Ser (S) | Thr |
| Thr (T) | Ser |
| Trp (W) | Tyr |
| Tyr (Y) | Trp; Phe |
| Val (V) | Ile; Leu |

Other substitutions also are permissible and can be determined empirically or in accord with known conservative substitutions.

[0176] As used herein, “sequence identity” refers to the number of identical or similar amino acids or nucleotide bases in a comparison between a test and a reference polypeptide or polynucleotide. Sequence identity can be determined by sequence alignment of nucleic acid or protein sequences to identify regions of similarity or identity. For purposes herein, sequence identity is generally determined by alignment to identify identical residues. The alignment can be local or global. Typically, sequence identity is determined by global alignment across the full-length of both compared sequences. Matches, mismatches and gaps can be identified between compared sequences. Gaps are null amino acids or nucleotides inserted between the residues of aligned sequences so that identical or similar characters are aligned. Generally, there can be internal and terminal gaps. Sequence identity can be determined by taking into account gaps as the number of identical residues/length of the shortest sequence×100. When using gap penalties, sequence identity can be determined with no penalty for end gaps (e.g. terminal gaps are not penalized). Alternatively, sequence identity can be determined without taking into account gaps as the number of identical positions/length of the total aligned sequence×100.

[0177] As used herein, a “global alignment” is an alignment that aligns two sequences from beginning to end, aligning each letter in each sequence only once. An alignment is produced, regardless of whether or not there is similarity or identity between the sequences. For example, 50% sequence identity based on “global alignment” means that in an alignment of the full sequence of two compared sequences each of 100 nucleotides in length, 50% of the residues are the same. It is understood that global alignment also can be used in determining sequence identity even when the length of the aligned sequences is not the same. The differences in the terminal ends of the sequences will be taken into account in determining sequence identity, unless the “no penalty for end gaps” is selected. Generally, a global alignment is used on sequences that share significant similarity over most of their length. Exemplary algorithms for performing global alignment include the Needleman-Wunsch algorithm (Needleman et al. J. Mol. Biol. 48: 443 (1970). Exemplary programs for performing global alignment are publicly available and include the Global Sequence Alignment Tool available at the National Center for Biotechnology Information (NCBI) website (ncbi.nlm.nih.gov/), and the program available at deepc2.psi.iastate.edu/aat/align/align.html.

[0178] As used herein, a “local alignment” is an alignment that aligns two sequence, but only aligns those portions of the sequences that share similarity or identity. Hence, a local alignment determines if sub-segments of one sequence are present in another sequence. If there is no similarity, no alignment will be returned. Local alignment algorithms include BLAST or Smith-Waterman algorithm (Adv. Appl. Math. 2: 482 (1981)). For example, 50% sequence identity based on “local alignment” means that in an alignment of the full sequence of two compared sequences of any length, a region of similarity or identity of 100 nucleotides in length has 50% of the residues that are the same in the region of similarity or identity.

[0179] For purposes herein, sequence identity can be determined by standard alignment algorithm programs used with default gap penalties established by each supplier. Default parameters for the GAP program can include: (1) a unary comparison matrix (containing a value of 1 for identities and 0 for non identities) and the weighted comparison matrix of Gribskov et al. Nucl. Acids Res. 14: 6745 (1986), as described by Schwartz and Dayhoff, eds., Atlas of Protein Sequence and Structure, National Biomedical Research Foundation, pp. 353-358 (1979); (2) a penalty of 3.0 for each gap and an additional 0.10 penalty for each symbol in each gap; and (3) no penalty for end gaps. Whether any two nucleic acid molecules have nucleotide sequences or any two polypeptides have amino acid sequences that are at least 80%, 85%, 90%, 95%, 96%, 97%, 98% or 99% “identical,” or other similar variations reciting a percent identity, can be determined using known computer algorithms based on local or global alignment (see e.g., wikipedia.org/wiki/Sequence_alignment_software, providing links to dozens of known and publicly available alignment databases and programs). Generally, for purposes herein sequence identity is determined using computer algorithms based on global alignment, such as the Needleman-Wunsch Global Sequence Alignment tool available from NCBI/BLAST (blast.ncbi.nlm.nih gov/Blast.cgi?CMD=Web&Page_TYPE=BlastHome); LAlign (William Pearson implementing the Huang and Miller algorithm (Adv. Appl. Math. (1991) 12:337-357)); and program from Xiaoqui Huang available at deepc2.psi.iastate.edu/aat/align/align.html. Local alignment also can be used when the sequences being compared are substantially the same length.

[0180] Therefore, as used herein, the term “identity” represents a comparison or alignment between a test and a reference polypeptide or polynucleotide. In one non-limiting example, “at least 90% identical to” refers to percent identities from 90 to 100% relative to the reference polypeptide or polynucleotide. Identity at a level of 90% or more is indicative of the fact that, assuming for exemplification purposes a test and reference polypeptide or polynucleotide length of 100 amino acids or nucleotides are compared, no more than 10% (i.e., 10 out of 100) of amino acids or nucleotides in the test polypeptide or polynucleotide differs from that of the reference polypeptides. Similar comparisons can be made between a test and reference polynucleotides. Such differences can be represented as point mutations randomly distributed over the entire length of an amino acid sequence or they can be clustered in one or more locations of varying length up to the maximum allowable, e.g., 10/100 amino acid difference (approximately 90% identity). Differences also can be due to deletions or truncations of amino acid residues. Differences are defined as nucleic acid or amino acid substitutions, insertions or deletions. Depending on the length of the compared sequences, at the level of homologies or identities above about 85-90%, the result can be independent of the program and gap parameters set; such high levels of identity can be assessed readily, often without relying on software.

[0181] As used herein, an allelic variant or allelic variation references any of two or more alternative forms of a gene occupying the same chromosomal locus. Allelic variation arises naturally through mutation, and can result in phenotypic polymorphism within populations. Gene mutations can be silent (no change in the encoded polypeptide) or can encode polypeptides having altered amino acid sequence. The term “allelic variant” also is used herein to denote a protein encoded by an allelic variant of a gene. Typically the reference form of the gene encodes a wildtype form and/or predominant form of a polypeptide from a population or single reference member of a species. Typically, allelic variants, which include variants between and among species, have at least 80%, 90% or greater amino acid identity with a wildtype and/or predominant form from the same species; the degree of identity depends upon the gene and whether comparison is interspecies or intraspecies. Generally, intraspecies allelic variants have at least about 80%, 85%, 90% or 95% identity or greater with a wildtype and/or predominant form, including 96%, 97%, 98%, 99% or greater identity with a wildtype and/or predominant form of a polypeptide. Reference to an allelic variant herein generally refers to variations in proteins among members of the same species.

[0182] As used herein, “allele,” which is used interchangeably herein with “allelic variant” refers to alternative forms of a gene or portions thereof. Alleles occupy the same locus or position on homologous chromosomes. When a subject has two identical alleles of a gene, the subject is said to be homozygous for that gene or allele. When a subject has two different alleles of a gene, the subject is said to be heterozygous for the gene. Alleles of a specific gene can differ from each other in a single nucleotide or several nucleotides, and can include modifications such as substitutions, deletions and insertions of nucleotides. An allele of a gene also can be a form of a gene containing a mutation.

[0183] As used herein, species variants refer to variants in polypeptides among different species, including different mammalian species, such as mouse and human. Exemplary of species variants provided herein are primates, such as, but not limited to, human, chimpanzee, macaque, cynomolgus monkey, gibbon, orangutan, or marmoset. Generally, species variants have 70%, 75%. 80%, 85%, 90%, 91%, 92%, 93%, 94%, 95%, 96%, 97%, 98% or sequence identity. Corresponding residues between and among species variants can be determined by comparing and aligning sequences to maximize the number of matching nucleotides or residues, for example, such that identity between the sequences is equal to or greater than 95%, equal to or greater than 96%, equal to or greater than 97%, equal to or greater than 98% or equal to greater than 99%. The position of interest is then given the number assigned in the reference nucleic acid molecule. Alignment can be effected manually or by eye, particularly, where sequence identity is greater than 80%.

[0184] As used herein, substantially pure means sufficiently homogeneous to appear free of readily detectable impurities as determined by standard methods of analysis, such as thin layer chromatography (TLC), gel electrophoresis and high performance liquid chromatography (HPLC), used by those of skill in the art to assess such purity, or sufficiently pure such that further purification would not detectably alter the physical and chemical properties, such as enzymatic and biological activities, of the substance. Methods for purification of the compounds to produce substantially chemically pure compounds are known to those of skill in the art. A substantially chemically pure compound can, however, be a mixture of stereoisomers or isomers. In such instances, further purification might increase the specific activity of the compound.

[0185] As used herein, isolated or purified polypeptide or protein or biologically-active portion thereof is substantially free of cellular material or other contaminating proteins from the cell or tissue from which the protein is derived, or substantially free from chemical precursors or other chemicals when chemically synthesized. Preparations can be determined to be substantially free if they appear free of readily detectable impurities as determined by standard methods of analysis, such as thin layer chromatography (TLC), gel electrophoresis and high performance liquid chromatography (HPLC), used by those of skill in the art to assess such purity, or sufficiently pure such that further purification would not detectably alter the physical and chemical properties, such as enzymatic and biological activities, of the substance. Methods for purification of the compounds to produce substantially chemically pure compounds are known to those of skill in the art. A substantially chemically pure compound, however, can be a mixture of stereoisomers. In such instances, further purification might increase the specific activity of the compound.

[0186] As used herein, synthetic, with reference to, for example, a synthetic nucleic acid molecule or a synthetic gene or a synthetic peptide refers to a nucleic acid molecule or polypeptide molecule that is produced by recombinant methods and/or by chemical synthesis methods.

[0187] As used herein, a disease or disorder refers to a pathological condition in an organism resulting from, for example, infection or genetic defect, and characterized by identifiable symptoms. An exemplary disease as described herein is a neoplastic disease, such as cancer.

[0188] As used herein, neoplastic disease refers to any disorder involving cancer, including tumor development, growth, metastasis and progression.

[0189] As used herein, cancer is a term for diseases caused by or characterized by any type of malignant tumor, including metastatic cancers, lymphatic tumors, and blood cancers. Exemplary cancers include, but are not limited to, leukemia, lymphoma, pancreatic cancer, lung cancer, ovarian cancer, breast cancer, cervical cancer, bladder cancer, prostate cancer, glioma tumors, adenocarcinomas, liver cancer and skin cancer. Exemplary cancers in humans include a bladder tumor, breast tumor, prostate tumor, basal cell carcinoma, biliary tract cancer, bladder cancer, bone cancer, brain and CNS cancer (e.g., glioma tumor), cervical cancer, choriocarcinoma, colon and rectum cancer, connective tissue cancer, cancer of the digestive system; endometrial cancer, esophageal cancer; eye cancer; cancer of the head and neck; gastric cancer; intra-epithelial neoplasm; kidney cancer; larynx cancer; leukemia; liver cancer; lung cancer (e.g., small cell and non-small cell); lymphoma including Hodgkin's and Non-Hodgkin's lymphoma; melanoma; myeloma, neuroblastoma, oral cavity cancer (e.g., lip, tongue, mouth, and pharynx); ovarian cancer; pancreatic cancer, retinoblastoma; rhabdomyosarcoma; rectal cancer, renal cancer, cancer of the respiratory system; sarcoma, skin cancer; stomach cancer, testicular cancer, thyroid cancer; uterine cancer, cancer of the urinary system, as well as other carcinomas and sarcomas. Exemplary cancers commonly diagnosed in dogs, cats, and other pets include, but are not limited to, lymphosarcoma, osteosarcoma, mammary tumors, mastocytoma, brain tumor, melanoma, adenosquamous carcinoma, carcinoid lung tumor, bronchial gland tumor, bronchiolar adenocarcinoma, fibroma, myxochondroma, pulmonary sarcoma, neurosarcoma, osteoma, papilloma, retinoblastoma, Ewing's sarcoma, Wilm's tumor, Burkitt's lymphoma, microglioma, neuroblastoma, osteoclastoma, oral neoplasia, fibrosarcoma, osteosarcoma and rhabdomyosarcoma, genital squamous cell carcinoma, transmissible venereal tumor, testicular tumor, seminoma, Sertoli cell tumor, hemangiopericytoma, histiocytoma, chloroma (e.g., granulocytic sarcoma), corneal papilloma, corneal squamous cell carcinoma, hemangiosarcoma, pleural mesothelioma, basal cell tumor, thymoma, stomach tumor, adrenal gland carcinoma, oral papillomatosis, hemangioendothelioma and cystadenoma, follicular lymphoma, intestinal lymphosarcoma, fibrosarcoma and pulmonary squamous cell carcinoma. Exemplary cancers diagnosed in rodents, such as a ferret, include, but are not limited to, insulinoma, lymphoma, sarcoma, neuroma, pancreatic islet cell tumor, gastric MALT lymphoma and gastric adenocarcinoma. Exemplary neoplasias affecting agricultural livestock include, but are not limited to, leukemia, hemangiopericytoma and bovine ocular neoplasia (in cattle); preputial fibrosarcoma, ulcerative squamous cell carcinoma, preputial carcinoma, connective tissue neoplasia and mastocytoma (in horses); hepatocellular carcinoma (in swine); lymphoma and pulmonary adenomatosis (in sheep); pulmonary sarcoma, lymphoma, Rous sarcoma, reticulo-endotheliosis, fibrosarcoma, nephroblastoma, B-cell lymphoma and lymphoid leukosis (in avian species); retinoblastoma, hepatic neoplasia, lymphosarcoma (lymphoblastic lymphoma), plasmacytoid leukemia and swimbladder sarcoma (in fish), caseous lymphadenitis (CLA): chronic, infectious, contagious disease of sheep and goats caused by the bacterium Corynebacterium pseudotuberculosis, and contagious lung tumor of sheep caused by jaagsiekte.

[0190] As used herein, a “metastasis” refers to the spread of cancer from one part of the body to another. For example, in the metastatic process, malignant cells can spread from the site of the primary tumor in which the malignant cells arose and move into lymphatic and blood vessels, which transport the cells to normal tissues elsewhere in an organism where the cells continue to proliferate. A tumor formed by cells that have spread by metastasis is called a “metastatic tumor,” a “secondary tumor” or a “metastasis.”

[0191] As used herein, treatment of a subject that has a neoplastic disease, such as a cancer including a tumor or metastasis, means any manner of treatment in which the symptoms of having the neoplastic disease are ameliorated or otherwise beneficially altered. Typically, treatment of a tumor or metastasis in a subject encompasses any manner of treatment that results in slowing of tumor growth, lysis of tumor cells, reduction in the size of the tumor, prevention of new tumor growth, or prevention of metastasis of a primary tumor, including inhibition vascularization of the tumor, tumor cell division, tumor cell migration or degradation of the basement membrane or extracellular matrix.

[0192] As used herein, a tumor, also known as a neoplasm, is an abnormal mass of tissue that results when cells proliferate at an abnormally high rate. Tumors may show partial or total lack of structural organization and functional coordination with normal tissue. Tumors can be benign (not cancerous), or malignant (cancerous). As used herein, a tumor is intended to encompass hematopoietic tumors as well as solid tumors.

[0193] Malignant tumors can be broadly classified into three major types. Carcinomas are malignant tumors arising from epithelial structures (e.g. breast, prostate, lung, colon, pancreas). Sarcomas are malignant tumors that originate from connective tissues, or mesenchymal cells, such as muscle, cartilage, fat or bone. Leukemias and lymphomas are malignant tumors affecting hematopoietic structures (structures pertaining to the formation of blood cells) including components of the immune system. Other malignant tumors include, but are not limited to, tumors of the nervous system (e.g. neurofibromatomas), germ cell tumors, and blastic tumors.

[0194] As used herein, proliferative disorders include any disorders involving abnormal proliferation of cells (i.e. cells proliferate more rapidly compared to normal tissue growth), such as, but not limited to, neoplastic diseases.

[0195] As used herein, a “tumor cell” is any cell that is part of a tumor. Typically, the viruses provided herein preferentially infect tumor cells in a subject compared to normal cells.

[0196] As used herein, a “metastatic cell” is a cell that has the potential for metastasis. Metastatic cells have the ability to metastasize from a first tumor in a subject and can colonize tissue at a different site in the subject to form a second tumor at the site.

[0197] As used herein, “tumorigenic cell,” is a cell that, when introduced into a suitable site in a subject, can form a tumor. The cell can be non-metastatic or metastatic.

[0198] As used throughout, subject can be a vertebrate, more specifically a mammal (e.g., a human, horse, cat, dog, cow, pig, sheep, goat, mouse, rabbit, rat, and guinea pig), birds, reptiles, amphibians, fish, and any other animal. The term does not denote a particular age or sex. Thus, adult and newborn subjects, whether male or female, are intended to be covered. As used herein, patient or subject may be used interchangeably and can refer to a subject in need of a therapeutic agent.

[0199] As used herein, a patient refers to a human subject.

[0200] As used herein, a composition refers to any mixture. It can be a solution, suspension, liquid, powder, paste, aqueous, non-aqueous or any combination thereof.

[0201] As used herein, a combination refers to any association between or among two or more items. The combination can be two or more separate items, such as two compositions or two collections, can be a mixture thereof, such as a single mixture of the two or more items, or any variation thereof. The elements of a combination are generally functionally associated or related.

[0202] As used herein, a kit is a packaged combination that optionally includes other elements, such as additional reagents and instructions for use of the combination or elements thereof. Kits optionally include instructions for use.

[0203] As used herein, the term assessing or determining is intended to include quantitative and qualitative determination in the sense of obtaining an absolute value for the activity of a product, and also of obtaining an index, ratio, percentage, visual or other value indicative of the level of the activity. Assessment can be direct or indirect.

[0204] As used herein, “disease or disorder” refers to a pathological condition in an organism resulting from cause or condition including, but not limited to, infections, acquired conditions, genetic conditions, and characterized by identifiable symptoms.

[0205] As used herein, “treating” a subject with a disease or condition means that the subject's symptoms are partially or totally alleviated, or remain static following treatment. Hence treatment encompasses prophylaxis, therapy and/or cure. Prophylaxis refers to prevention of a potential disease and/or a prevention of worsening of symptoms or progression of a disease.

[0206] As used herein, treatment means any manner in which the symptoms of a condition, disorder or disease or other indication, are ameliorated or otherwise beneficially altered.

[0207] As used herein therapeutic effect means an effect resulting from treatment of a subject that alters, typically improves or ameliorates the symptoms of a disease or condition or that cures a disease or condition. A therapeutically effective amount refers to the amount of a composition, molecule or compound which results in a therapeutic effect following administration to a subject.

[0208] As used herein, amelioration of the symptoms of a particular disease or disorder by a treatment, such as by administration of a pharmaceutical composition or other therapeutic, refers to any lessening, whether permanent or temporary, lasting or transient, of the symptoms that can be attributed to or associated with administration of the composition or therapeutic.

[0209] As used herein, prevention or prophylaxis refers to methods in which the risk of developing disease or condition is reduced.

[0210] As used herein, an effective amount is the quantity of a therapeutic agent necessary for preventing, curing, ameliorating, arresting or partially arresting a symptom of a disease or disorder.

[0211] As used herein, unit dose form refers to physically discrete units suitable for human and animal subjects and packaged individually as is known in the art.

[0212] As used herein, a single dosage formulation refers to a formulation for direct administration.

[0213] As used herein, a multiple dosage formulation refers to a formulation for use in repeat administrations.

[0214] As used herein, an “article of manufacture” is a product that is made and sold. As used throughout this application, the term is intended to encompass delivery agents, such as non-viral nucleic acid vectors, contained in articles of packaging.

[0215] As used herein, the singular forms “a,” “an” and “the” include plural referents unless the context clearly dictates otherwise. Thus, for example, reference to a compound, comprising “an extracellular domain” includes compounds with one or a plurality of extracellular domains.

[0216] As used herein, the term “or” is used to mean “and/or” unless explicitly indicated to refer to alternatives only or the alternatives are mutually exclusive.

[0217] As used herein, ranges and amounts can be expressed as “about” a particular value or range. About also includes the exact amount. Hence “about 5 bases” means “about 5 bases” and also “5 bases.”

[0218] As used herein, “optional” or “optionally” means that the subsequently described event or circumstance does or does not occur, and that the description includes instances where said event or circumstance occurs and instances where it does not. For example, an optionally substituted group means that the group is unsubstituted or is substituted.

[0219] As used herein, the abbreviations for any protective groups, amino acids and other compounds, are, unless indicated otherwise, in accord with their common usage, recognized abbreviations, or the IUPAC-IUB Commission on Biochemical Nomenclature (see, (1972) Biochem. 11:1726).

[0220] For clarity of disclosure, and not by way of limitation, the detailed description is divided into the subsections that follow.

### B. OVERVIEW OF THE ONCOVECTOR SYSTEM

[0221] Provided herein are non-viral oncolytic DNA vector (oncovector) nucleic acid molecules that exhibit replicative and other bystander effects, such as oncovector activities. Existing viral and non-viral gene therapies have been explored for the treatment of solid tumors. For example, oncolytic viruses have been developed that specifically target tumor cells. Oncolytic viruses, however, are live viruses and can be limited by efficiency of viral infection or by the requirement for helper virus or producer cell line. Also, they can be pathogenic to humans or can be highly immunogenic (Chernajovsky et al. (2006) BMJ 332: 170-172). Hence, these therapies are limited due to the immune responses generated to viral vectors and the relatively low efficiency of delivery of non-viral vectors. For example, viral vectors are associated with poor delivery characteristics that cannot be offset by higher doses, since these vectors can be toxic at high concentrations. Also, repeated dosing is also an issue, since viral-based vectors are highly antigenic.

[0222] The oncovector system and constructs provided herein are modeled after oncolytic viral therapy, but they overcome these limitations because they are non-viral, yet they autonomously replicate in cells. Although the self-replication and runaway amplification of plasmid DNA can cause cell death by itself, the constructs also exhibit bystander effects on other adjacent cells. The constructs provided exhibit replicative and oncolytic properties, including bystander effects, based on the expression of a first gene product that permits the plasmid to accumulate or be reproduced or replicate in cells and a second gene that results in expression of a bystander product that not only results in killing of the targeted cell but also killing of adjacent cells in a specific and efficient matter. For example, the bystander gene can result in expression of a fusogenic peptide or protein that causes cell-cell fusion. The expression of fusogenic peptides can cause multinucleated syncytia formation and thereby result in spreading to neighboring cells. Other bystander genes, such as pro-drug modifying enzymes, also are contemplated as described elsewhere herein. The constructs also can contain other adjunct therapy genes that exhibit therapeutic activity, such as cytokines, chemokines or other bystander genes. The oncovectors can be engineered to selectively transform disease cells, such as tumor or cancer cells. Hence, the oncovectors can be amplified exclusively in cancer cells, and express proteins that kill targeted and/or adjoining cancer cells effectively and specifically. Thus, also provided herein are methods and uses of treating tumor and cancer cells using the provided oncovector nucleic acid molecules.

[0223] For the replicative activity, the nucleic acid constructs provided herein contain genes required for replication minimally containing an origin of replication (origin). Replication of the nucleic acid molecules can be mediated by non-viral (e.g., bacterial components) or viral mechanisms, including retrovirus systems and DNA-based virus systems. Generally, the constructs are episomally expressed and replicate extrachromosomally in host cells such that they are autonomously replicating plasmids (ARPs). Hence, the constructs provided herein typically use a DNA-based virus mechanism of replication, for example, mechanisms derived from polyomaviruses. Such systems permit episomal replication of the nucleic acid molecule and produce a high episomal copy number of expressed genes. In such systems, initiation of replication from the origin requires expression of a compatible or cognate replication initiator protein, which activates the origin. Hence, the origin and the replication initiator make up a replication unit, both of which are required for replication to occur. The replication initiator can be expressed by the host cell, or can be expressed from the same or different construct as the origin is located on. Where the replication initiator is contained on a separate construct, the nucleic acid molecule containing the origin and the nucleic acid molecule containing the replication origin must be delivered into the same cell for plasmid replication to occur. Where the replication initiator is contained on the same nucleic acid molecule as the origin, the nucleic acid molecule is capable of self-replication.

[0224] The concurrent use of a replication initiator (e.g. SV40 TAg or TAg) with its cognate origin of replication (e.g. SV40 ori) or variations thereof results in the replication of the plasmid containing the origin of replication. The results of plasmid replication are an increase in the plasmid copy number, an increase in expression of genes expressed by the plasmid, and an increase in the duration of gene expression. The use of an oncovector system is beneficial for gene replacement therapy and cancer therapeutics because of the increase in gene expression and duration of expression that enhances the production of therapeutic proteins.

[0225] The oncovector nucleic acid molecules provided herein also contain a second gene that is a therapeutic gene, and in particular a therapeutic gene with anti-tumorigenic activity. For example, the therapeutic gene can be a bystander gene. It is found herein that although some cell viability can be affected by replicative activity alone, to eradicate all the cells in a tumor, a bystander effect is required. Bystander genes can act to spread the killing effect from one targeted cell to several neighboring cells. Exemplary bystander genes in the nucleic acid constructs provided herein can include pro-drug modifying enzymes or fusogenic genes. For example, expression of cytosine deaminase, an enzyme that converts non-toxic 5-Fluorocytosine to the anti-cancer agent 5-fluorouracil (5-FU), can generate sufficient local 5-FU to kill adjoining tumor cells without systemic side effects (Mullen, 1992).

[0226] Bystander genes also include genes that express a fusogenic protein, which causes the cell expressing it to fuse with neighboring cells. Hence, in particular provided herein are oncovector nucleic acid molecules that contain a second gene that is a fusogenic gene. The fusogenic activity induces the formation of multinucleated cells that cannot support cell division, thereby killing the cells and rendering the nucleic acid molecule lytic. For example, upon fusion of cells the multinucleated mass of cells will eventually undergo apoptosis and die. Hence, the expression of a fusogenic gene will result in tumor cell-cell fusion and syncytial formation. Once tumor cells form syncytia they are no longer able to divide normally, ultimately resulting in cell death. Also, cell fragments produced from the mass of cells can be phagocytosed by antigen presenting cells (APCs), which can then induce an adaptive immune response against the tumor cells.

[0227] The replication component and oncolytic bystander component can be expressed under any constitutive promoter. Typically, the constructs are designed such that the origin is operative and initiates replication in a specific and selective manner so that the construct accumulates in a predetermined cell or tissue, such as, for example, a disease-specific cell or tumor cell. Accumulation of the constructs in specific cells or tissues can be maintained by regulation of the origin directly or indirectly by cellular components, expression of a gene(s) on a separate episomal or non-episomal nucleic acid, or by expression of a gene(s) contained on the same nucleic acid molecule as the ori.

[0228] In one example, expression of the cognate replication initiator gene is regulated, thereby indirectly regulating initiation of replication by the origin. For example, the replication initiator can be expressed under the control of a tissue-specific, cell-specific, or cell-cycle dependent promoter so that transcription only will occur where the promoter is active. In cells or tissues where the replication initiator is expressed, replication of the nucleic acid can proceed by binding of the replication initiator to the cognate origin. Hence, the oncovector constructs and system can be expressed in a tissue or cell-specific manner so that the expressed therapeutic specifically targets diseased or tumor cells.

[0229] Exemplary of oncovector constructs provided herein are those that accumulate in tumor cells by virtue of cellular deficiency in or mutant for tumor suppressor genes, such as, for example, p53 or retinoblastoma (Rb). Hence, tumor cells that are transformed and that contain a mutated or inactivated p53 or Rb gene can be selectively targeted by the nucleic acid constructs herein. In normal cells containing active tumor suppressor genes, the oncovector nucleic acid molecules are designed to inhibit gene expression of the nucleic acid molecule so that expression of the therapeutic gene in normal cells does not occur. For example, a cell-cycle dependent promoter that is regulated by tumor suppressor genes can be included in the constructs. Hence, in the case of a nucleic acid construct under the control of a cell-cycle dependent protein, such as for example, E2F1, that is regulated by tumor suppressor genes such as p53 and Rb, the construct should accumulate in tumor cells that do not express these genes, and thereby express the fusogenic protein selectively in tumor cells. On the other hand, when such tumor cells come into contact with normal cells, the expression of the tumor suppressor genes in the normal cells should terminate expression of the co-expressed bystander gene, such as a bystander gene encoding a fusogenic protein. This is exemplified in FIG. 1, which shows that upon contact with a non-tumor cell fusion should cease (see FIG. 1). Thus, the constructs can replicate in tumor cells and spread to neighboring tumor cells only.

[0230] Upon delivery, replication and expression of the oncovector nucleic acid molecules encoding therapeutic genes, such as fusogenic genes and other genes, results in self-amplification and propagation of anti-cancer activity that can extend beyond the initially targeted cancer cells. For example, the oncovector nucleic acids provided herein can exhibit therapeutic effects upon delivery of the nucleic acid molecules to even a small subset of tumor cells within a tumor site, for example, less than 20%, less than 15%, less than 10% or less than 5% of tumor cells within a tumor site. Hence, the oncovectors nucleic acid molecules provided herein can be used treat cancers and tumors. For example, the oncovector nucleic acid molecules can be used to specifically target cancer cells. In other examples, the oncovector nucleic acid molecules can also treat cancer by effects on non-targeted cancer cells by killing adjoining cancer cells by bystander effects of expressed genes, such as fusogenic genes or other toxic genes. The oncovector nucleic acid molecules can be formulated to facilitate systemic administration.

### C. COMPONENTS OF THE ONCOVECTOR SYSTEM AND RESULTING ONCOVECTORS

[0231] Provided herein are oncovector nucleic constructs and systems that are capable of autonomously replicating in cells and that support the expression of cancer or tumor therapeutic proteins that can result in killing of targeted cells and other adjacent cells via bystander effects. Hence, the constructs provided herein are designed to self-replicate. The minimum components of an oncovector system provided herein are a replication initiator and a cognate origin of replication and an oncotherapeutic bystander gene that supports cancer or tumor therapy. The oncotherapeutic bystander gene can be any protein that has a known anti-tumorigenic property or activity and is associated with bystander effects on tumor cells. In some examples, multiple therapeutic genes can be expressed as different transcription units. The replication initiator can be expressed from the same nucleic acid construct as its origin of replication or on a separate nucleic acid construct, or it can be expressed from a stably expressed cell line.

[0232] For example, provided herein is an oncovector nucleic acid molecule that contains at least one origin of replication (Ori), at least one replication initiator capable of recognizing the at least one origin of replication, at least one oncotherapeutic bystander gene, and at least one promoter to drive expression of the at least one replication initiator and/or at least one oncotherapeutic bystander gene. In the constructs provided herein, the promoter can be a universal or constitutive promoter, or a tissue-specific, cell-specific or cell-cycle dependent promoter. Generally, the constructs provided herein contain one or more promoters that permit the accumulation of the construct in a desired cell or tissue, such as a tumor cell. The components therein can be in any order.

[0233] In the oncovector construct systems provided herein, nucleic acid molecules containing at least two open reading frames (ORFs) are provided where one ORF codes for a replication initiator and the other codes for a oncotherapeutic bystander protein. The ORFs can be on the same or different nucleic acid molecule. The ORF also can be under the control of the same or different promoter. In some examples, the ORF can be included as a complete transcription unit for the coded protein.

[0234] For example, provided herein is a nucleic acid molecule that contains at least two ORFs where one ORF codes for a replication initiator and the other codes for a oncotherapeutic bystander protein. Hence, typically, the oncotherapeutic bystander gene is expressed from the same nucleic acid construct as the replication initiator. For example, the nucleic acid construct is multicistronic, such as bicistronic. The oncotherapeutic bystander gene can be expressed from the same or different promoter as the replication initiator. In one example, the genes are expressed from different promoters as different expression cassettes. The promoter in each expression cassette can be the same or different. For example, the oncotherapeutic gene of interest is located as a first transcription unit in a first expression cassette and the replication initiator is in a second transcription unit in a second expression cassette. In other examples, the replication initiator is in the first expression cassette and the oncotherapeutic gene of interest is in the second expression cassette.

[0235] In particular examples, provided herein is a nucleic acid molecule where the components are positioned on the nucleic acid in a consecutive order to include: A) a first promoter that controls expression of the first gene containing a first ORF; B) a first ORF coding for a therapeutic protein, for example, a bystander protein; C) a second promoter that controls expression of the second gene containing a second ORF; D) a second ORF coding for a replication initiator; and E) an origin of replication. The first and second ORF can be in reverse order. For example, also provided herein is a nucleic acid molecule where the components are positioned on the nucleic acid in a consecutive order to include: A) a first promoter that controls expression of the first gene containing a first ORF; B) a first ORF coding for a replication initiator; C) a second promoter that controls expression of the second gene containing a second ORF; D) a second ORF coding for a therapeutic protein, for example, a bystander protein; and E) an origin of replication. The first and second promoters can be the same or different.

[0236] In another examples, the nucleic acid construct is an IRES-based vector and contains an internal ribosome binding site (IRES) separating the genes of interest such that the replication initiator and the oncotherapeutic bystander gene are expressed under the control of the same promoter. Thus, provided herein is a nucleic acid molecule whereby each ORF is separated by an internal ribosomal entry site (IRES) and is under the control of the same promoter.

[0237] In particular examples, provided herein is a nucleic acid molecule where the components are positioned on the nucleic acid in a consecutive order to include: A) a first promoter that controls expression of the genes; B) a first ORF coding for a therapeutic protein, such as a bystander protein; C) an IRES separating the genes of interest; D) a second ORF coding for a replication initiator; and E) an origin of replication. The first and second ORF can be in reverse order. Hence, also provided herein is a nucleic acid molecule where the components are position on the nucleic acid in a consecutive order to include: A) a first promoter that controls expression of the genes; B) a first ORF coding for a replication initiator; C) an IRES separating the genes of interest; D) a second ORF coding for a therapeutic protein, for example, a bystander protein; and E) an origin of replication.

[0238] The constructs also can contain reporter genes or other adjunct tumor therapies such as cytokines, chemokines or suicide proteins. For example, reporter genes can be included to facilitate detection of the construct in vitro or in vivo. Reporter genes include, but are not limited to green fluorescent protein (GFP), red fluorescent protein (RFP), and luciferase (Luc). Any one or more of these components can be added to an oncovector construct provided herein so long as the oncovector construct exhibits replication and oncolytic activities. In addition, the constructs provided herein are designed such that they do not exhibit transforming activities. In some examples, the further reporter gene and/or adjunct tumor therapy gene can be expressed as a separate expression cassette from one or both of the replication initiator or the therapeutic gene, for example, bystander gene. In such examples, the reporter gene and/or adjunct tumor therapy gene can be controlled by a promoter that is the same or different from the other promoters in the construct. In other examples, the further reporter gene and/or adjunct tumor therapy gene is co-expressed with one or both of the replication initiator or the bystander gene by the inclusion of an IRES or a further IRES to permit expression from the same promoter.

[0239] In addition, the nucleic acid molecules also can contain other regulatory elements, for example, any that control or modulate replication of the nucleic acid molecule or expression of the genes contained therein. Other elements include, but are not limited to, introns, untranslated regions, non-coding regions, polyadenylation signals, antibiotic resistance genes, IRES, other regulatory regions, and others. In particular examples, an internal promoter can be included in a transcription unit to control the expression of the second gene. This can be advantageous in IRES-based vectors where a first and second gene are co-expressed, but the expression of the second gene is not as strong as the first gene. This is exemplified, for example, in the constructs set forth in SEQ ID NOS: 727 and 728, whereby a Rous sarcoma virus (RSV) internal promoter has been included to control expression of the second gene. One skilled in the art will be able to determine the specific necessary elements for each specific oncovector nucleic acid molecule and application.

[0240] The constructs provided herein can be in linear or circular form. Typically, for polyoma-based DNA replication the constructs are in circular form. The constructs can be artificially synthesized or can be provided in the backbone of a plasmid or vector. The constructs also can be optimized for human codon usage and/or can be modified to remove CpG motifs to make them less immunogenic. In some examples, the constructs can be delivered as naked DNA. In other examples, the constructs are delivered as nanoparticles, such as in the form of liposomes or wrapped up in DNA condensing agents.

[0241] A description of the component parts of the oncovector system is provided below. It is within the level of one of skill in the art to generate and design oncovector systems as described herein. Exemplary oncovector construct systems are provided.

[0242] 1. Replication Unit

[0243] The nucleic acid molecules provided herein are characterized by their ability to replicate extrachromosomally, thereby permitting the episomal expression of hundreds to thousands of copies. Episomal expression systems have principally been developed from several DNA viruses, typically polyomaviruses and herpesviruses, including bovine papilloma virus (BPV) (Sarver, et al., 1981, Mol. Cell. Biol, 1:486-496; Dimaio, et al., 1982, Proc. Natl. Acad. Sci, U.S.A., 97:4030-4034), SV40 (Tsui, et al., 1982, Cell, 30:49914), Epstein-Barr virus (EBV) (Yates, et al., 1985, Nature, 313:812-815; Margolskee, et al., 1988, Mol. Cell. Biol., 8:2837-2847; Belt et al., 1989, Gene, 84:407-417; Chittenden et al., 1989, J. Virol., 63:3016-3025), and BK virus (BKV) (Milansesi, et al., 1984, Mol. Cell. Biol., 4:1551-1560). Episomal replication relies on a viral origin of DNA replication and a virally encoded replication initiator that activates the viral origin and allows the episome to replicate in the host cell. The latter includes the large T antigen for SV40 (SV40 TAg), polyoma and BKV, and EBNA for EBV.

[0244] The replication initiator proteins recognize origin-specific sequences, melt the duplex DNA, and act as helicases exposing single-stranded DNA (ssDNA) for replication using host-encoded polymerases and other host DNA replication machinery (Meinke et al. (2006) J. Virol., 80:4304-4312). Generally, the viral origins contain multiple initiator binding sites containing short sequences of 5 or 6 base pairs organized as pairs of inverted repeats. Thus, a replication initiator can bind each origin at multiple sites. For example, the SV40 origin contains four GAGGC (SEQ ID NO:122) binding sites, termed P1 through P4, which supports binding of up to 12 molecules of SV40-TAg on the origin (Meinke et al. (2006) J. Virol. 80:4304-4312).

[0245] Accordingly, nucleic acid molecules provided herein contain a polyomavirus origin of DNA replication. Exemplary of origins include, but are not limited to, origins from SV40, BKV, JC virus, lymphotropic papovavirus, and simian agent 12. Any polyomavirus origin of replication that can be shown to drive episomal replication in cells, in particular human cells, is suitable for the nucleic acid molecule constructs provided herein.

[0246] DNA replication initiated at these loci is sensitive to control by the replication initiator (e.g., large T antigen or EBNA) of the same virus, and to a similar or lesser extent by large T antigen of other polyomaviruses. For example, the BKV origin drives episomal replication with either BKV large T antigen (BK-T) or SV40 TAg (see e.g., U.S. Pat. No. 6,339,065). Hence, in the presence of a compatible replication initiator, the polyomavirus origin will drive episomal replication. The origin/replication initiator combination should be tested to determine whether they drive replication of the episome. Exemplary of such a test for replication competency is described in Section F and involves transfecting or electroporating a population of cells with a nucleic acid molecule that expresses the large T antigen, or mutant thereof, with a vector containing the proposed origin of replication and then monitor the transfected cells for synthesis of episomal DNA, for example, by DpnI digest followed by quantitive polymerase chain reaction (PCR) or Southern Blot. Alternatively, a single nucleic acid molecule containing both the origin and replication initiator can be transfected to assess self-replication.

[0247] In addition to supporting replication, replication initiator proteins also can lead to transformation. For example, both SV40 TAg and BK-T, which are highly homologous, are tumorigenic and can bind to and thereby inactivate wild-type p53 and retinoblastoma (Rb) tumor suppressor genes products (Shin et al., 1975, Proc. Natl. Acad. Sci. USA, 72:4435-4439; Christian, et al., 1987, Cancer Res., 47:6066-6073; Michalovitz, et al., 1987, J. Virol., 61:2648-2654; Hanahan, et al., 1989, Science, 246:1265-1275; DeCaprio, et al., 1988, Cell, 54:275-283; Chen et al., 1990, J. Virol., 64:3350-3357; Chen et al., 1992, Oncogene, 7:1167-1175; Dyson et al., 1990, J. Virol., 64:1353-1356). Therefore, oncovector nucleic acid molecules containing a wild-type replication initiator can confer tumorigenic properties, making such nucleic acid molecules unsuitable for therapeutic purposes. Accordingly, mutations can be made to replication initiator genes to uncouple replication and transformation so that the replication initiators are not tumorigenic. Such mutations are known to one of skill in the art (see e.g., U.S. Pat. No. 6,339,065) and/or can be designed and tested using standard molecular biology techniques known to one of skill in the art. The mutants should be designed to be replication-competent and transformation-negative such that they induce DNA replication, but do not transform the host cell.

[0248] Exemplary assays to test for replication include, for example, Southern Blot analysis of Hirt supernatant or total cellular DNA extracted from transient episomal transfectants. Transforming activity of the replication initiator, or mutant thereof, can be tested directly (see e.g., Nakshatri, et al. (1988) J. Virol., 62:4613-21), or cells transfected with an expression vector expressing the replication initiator, or mutant thereof, can be tested for soft agar cloning activity or growth in nude or SCID mice. Alternatively, mutants can be selected based on negative binding studies with wild-type p53 and wild-type Rb. For example, one suitable assay measures binding by generating in vitro translated mutant replication initiator protein and mixing it with wild-type p53 or Rb (e.g., in vitro translated or baculovirus produced) before immunoprecipitation with antisera to p53 or Rb, respectively, to immunoprecipitate these proteins and any replication initiator complexed to them. Western blots to the immunoprecipitate can be developed with antisera to the replication initiator (e.g. large T antigen), which will detect mutant replication initiator that are positive for binding (see e.g., U.S. Pat. No. 6,339,065). In other examples, Rb and p53 wildtype cells can be transfected with plasmids encoding large T antigen mutants and cell lysates can be subject to immunoprecipitation to assess binding of T antigen and mutants thereof to p53 and Rb.

[0249] Thus, the nucleic acid molecules provided herein typically contain a polyomavirus origin that is compatible with a replication initiator. In one example, the nucleic acid molecule contains the polyomavirus origin and replication is initiated by a compatible replication initiator expressed by the host cell. In another example, the nucleic acid molecule contains the polyomavirus origin and replication is initiated by a compatible replication initiator, or mutant thereof, encoded on a separate nucleic acid molecule. In an additional example, the nucleic acid molecule is capable of autonomous replication and therefore contains a polyomavirus origin of DNA replication and a compatible replication initiator or mutant thereof, along with the other components of the vector as described herein such as a promoter that drives the expression of the replication initiator and/or a second therapeutic gene, for example, a bystander gene. Typically, in the above examples, the promoter is a promoter that drives expression of the replication initiator, and hence replication, in a tissue-specific or cell specific manner, for example, in a tumor-specific manner. Also, in any of the above examples, the replication initiator can be mutated such that it confers replication but not transformation of cells. The origin also can contain mutations to contain one or more pairs of binding sites for the cognate replication initiator. Exemplary of an origin is the origin of SV40 or mutants thereof and exemplary of a replication initiator is the SV40 TAg, or mutants thereof.

[0250] a. SV40 Origin and Mutants Thereof

[0251] Exemplary constructs provided herein contain an SV40 origin (ori). The core SV40 ori contains 4 binding sites for the SV40 TAg arranged in a palindromic pattern such that two of the GAGGC (SEQ ID NO:122) motifs are followed by two in the antisense orientation, CTCCG. SEQ ID NO:123 sets forth the SV40 core recognition sequence. SV40 ori can be described as a formula whereby the binding sites are defined as GAGGC and CTCCG, and the flanking regions as “N” (A, C, T or G; see e.g. SEQ ID NO:37, 79 or 124). The SV40 origin of replication, including the early promoter and origin of replication is set forth in SEQ ID NO:113.

[0252] In some examples, provided herein are nucleic acid molecule constructs containing an SV40 ori having variations of the core SV40 ori containing one or more pairs of binding sites for SV40 TAg. For example, the SV40 ori can be modified to contain 2, 3, 4, 5, 6, 7, 9, 10 or more binding sites for SV40 TAg. Exemplary of such variants are set forth in SEQ ID NOS: 123 or 124, whereby N can be A, C, T, G. Further variants also are provided herein whereby the N or flanking region can be any nucleotide. Exemplary of such variants are any set forth in SEQ ID NOS: 125-189. It is understood that any of the above sequences, and sequences adapted therefrom to contain further binding sites, can be included in the constructs provided herein.

[0253] In some examples, replication activity can be increased by modifying the SV40 origin of replication. For example, elimination of upstream enhancers of the SV40 promoter/enhancer can increase replication activity of the modified SV40 ori by reducing transcription from the SV40 promoter. For example, the sequence of an SV40 promoter containing a 5′ enhancer of SV40 promoter as set forth in SEQ ID NO:114 or 115 can be reduced to that set forth in SEQ ID NO:116 (in addition to Pac1 restriction sites added for ease of identification).

[0254] b. SV40 T Antigen and Mutants Thereof

[0255] Replication from the SV40 ori is initiated in the presence of the cognate SV40 TAg, or a mutant thereof, expressed from the host cell, or expressed from the same or separate nucleic acid molecule construct. Typically, the nucleic acid molecule is an autonomous replicating plasmid (ARP) and is self-replicating because the SV40 TAg, or mutant thereof, is contained on the same construct as the origin.

[0256] The SV40 TAg is a well characterized protein. The SV40 TAg has the amino acid sequence set forth in SEQ ID NO:564 (UniProt No. P03070), and is encoded by a sequence of nucleotides set forth in SEQ ID NO:561. It is a multidomain protein that contains an N-terminal J domain (corresponding to amino acids 1-82 of SEQ ID NO:564), a central origin binding domain (corresponding to amino acids 131-259 of SEQ ID NO:564), and a C-terminal helicase domain (corresponding to amino acids 251-627 of SEQ ID NO:564) (Gai et al., (2004) Cell, 119:47-60). The J domain is dispensable for DNA replication. For replicative activity, the origin binding domain recognizes the SV40 origin, to allow assembly of the SV40 TAg as a double hexamer necessary for distorting and melting of the double-stranded origin DNA via the helicase domain. For example, SV40 TAg multimers bind to 4 motifs of GAGGCG (two forwards and two in reverse orientation) within the core SV40 TAg binding domain (see e.g. SEQ ID NO:123) of the SV40 origin to initiate replication.

[0257] Nucleic acid constructs provided herein can contain an SV40 TAg replication initiator that has the nucleotide sequence set forth in SEQ ID NO:561. The encoding SV40 TAg replication initiator also can be modified to be CpG free or to be human codon-optimized. For example, an exemplary SV40 TAg replication initiator that has been modified to be CpG free is set forth in SEQ ID NO:562. An exemplary SV40 TAg replication initiator that has been human codon optimized is set forth in SEQ ID NO:563.

[0258] SV40 TAg also exhibits transforming activities. This ability is manifested by the binding of SV40 TAg to one or more tumor suppressors including, but not limited to, p53, Rb and HSP70 (Zalvide et al (1998) Mol. Cell. Biol., 18:1408-1415; Stubdal H et al. (1996) J. Virol., 70:2781-2788; Thompson D et al. (1990) Virology, 178:15-34; Sullivan C S et al. (2002) Microbol Mol Biol Rev. 66:179-202; Ludlow J W et al. (1990) Cell, 60:387-396; Tack et al. (1989) J. Virol., 63:3362-7; Pipas J M et al. (2001) Semin. Cancer Biol., 11:23-30). For example, SV40 TAg can disrupt the inhibitory complex formed between Rb and E2F (discussed in detail below), and this mechanism is important for SV40 TAg-mediated transformation (Zalvide et al (1998) Mol. Cell. Biol., 18:1408-1415). SV40 TAg also is capable of causing transformation of normal cells (Bennoun M et al., (1998) Oncogene, 17:1253-9; Ahuja D et al. (2005) Oncogene, 24:7729-45; Srinivasan A et al. (1989) J. Virol., 63:5459-5463). This activity has been localized to various parts of the protein structure by mutagenesis studies and studies of naturally occurring viral variants.

[0259] Typically, SV40 TAg contained in nucleic acid molecules provided herein contain mutations to encode a replication initiator that functions to uncouple transforming activity from replication activity. The resulting mutant SV40 TAg nucleic acid molecules can encode an SV40 TAg containing one or more amino acid replacements compared to the SV40 TAg set forth in SEQ ID NO:564. Generally, such mutants encode a mutant SV40 T Ag that exhibits decreased transforming activity, such as assessed by decreased binding to one or more of p53, Rb and/or HSP70. Decreased transforming activity is about or is less than 80%, 70%, 60%, 50%, 40%, 30%, 20%, 10%, 9%, 8%, 7%, 6%, 5%, 4%, 3%, 2%, 1%, 0.5% or less the transforming activity of wild-type SV40 T Ag, such as is set forth in SEQ ID NO:564. Further, such mutants generally retain at least or about at least 30%, 40%, 50%, 60%, 70%, 80%, 90%, 95% or more of the replication activity (i.e. helicase activity) of wild-type SV40 T Ag, such as is set forth in SEQ ID NO:564. Mutations in a nucleic acid molecule that encodes SV40 TAg amino acid replacements are known to one of skill in the art, or can be readily identified by routine molecular biology techniques. Assays to test for transforming and replication activities of SV-T also are well known to one of skill in the art and exemplary assays are described herein in Section F.

[0260] For example, amino acid replacement of SV40 TAg that uncouple p53 binding with helicase activity are known and include mutations D604R and V585R corresponding to amino acid positions set forth in SEQ ID NO:564 (Lilystron W. et al. (2006) Genes and Dev., 20:2373-2382). Other amino acid replacements are also known and characterized. Exemplary of such positions for replacement include, but are not limited to, L17, G18, L19, E20, R21, S22, A23, W24, G25, N26, I27, P28, L29, M30, R31, K32, L103, C105, E107, E108, S112, S189, N366, D367, L368, L369, D370, D402, T434, L435, A436, A437, A438, L439, L440, E441, L442, C443, G444, P453, V585, D604, S677 or S679 corresponding to positions set forth in SEQ ID NO:564. The substitution can be chosen from among any of the other 19 amino acids at that position, so long as SV40 TAg functions are not destroyed. Exemplary amino acid replacement include those that uncouple one or more of HSP70 binding, Rb family binding, and/or p53 binding. Exemplary of such amino acid replacements are set forth in Table 3 below. The sequence identifier number (SEQ ID NO) also is indicated.

TABLE 3
Transformation Mutants

| Amino Acid | SEQ ID | Amino Acid | SEQ ID |
|---|---|---|---|
| replacement | NO | Replacement | NO |
| L19F | 565 | E107L | 566 |
| E107K | 567 | E108L | 568 |
| D402R | 569 | D402E | 570 |
| P453S | 571 | V585R | 572 |
| D604R | 573 | P28S | 574 |
| L103P | 575 | C105A | 576 |
| S112N | 577 | S189N | 578 |
| S677A | | S679A | |

[0261] Typically, because different regions of the protein bind to different tumor suppressor genes, combination mutants are provided herein to uncouple replication and transformation induced by SV40 TAg. Such combination mutants are designed to reduce binding to tumor suppressor proteins, for example, p53, Rb and HSP70, yet sill allow SV40 TAg to function as an inducer of replication. The combination mutants can be tested to identify those that bind to and subvert the actions of tumor suppressors in normal cells, and therefore such mutant SV40 TAg provided in the nucleic acid molecules herein are designed so that cellular transformation does not occur in normal cell types. Exemplary of such combination mutants provided herein are set forth in Table 4.

TABLE 4
SV-T Combination Mutants

| | Mutational Effect | | | |
|---|---|---|---|---|
| | HSP70 | Rb Family | P53 | SEQ ID |
| Mutant | binding | Binding | Binding | NO: |
| E107L/E108L | | E107L; E108L | | 579 |
| E107L/E108L/D402R | | E107L; E108L | D402R | 589 |
| E107L/E108L/P453S | | E107L; E108L | P453S | 590 |
| E107L/E108L/V585R | | E107L; E108L | V585R | 591 |
| E107L/E108L/D604R | | E107L; E108L | D604R | 592 |
| L19F/E107L/E108L/D402R | L19F | E107L; E108L | D402R | 593 |
| L19F/E107L/E108L/P453S | L19F | E107L/E108L | P453S | 594 |
| L19F/E107L/E108L/V585R | L19F | E107L/E108L | V585R | 595 |
| L19F/E107L/E108L/D604R | L19F | E107L/E108L | D604R | 596 |
| P28S/E107L/E108L/D402R | P28S | E107L/E108L | D402R | 597 |
| P28S/E107L/E108L/P453S | P28S | E107L/E108L | P453S | 598 |
| P28S/E107L/E108L/V585R | P28S | E107L/E108L | V585R | 599 |
| P28S/E107L/E108L/V604R | P28S | E107L/E108L | V604R | 600 |
| L19F/P28S/L103P/C105A/ | L19F; | L103P; C105A; | V585R | 601 |
| E107L/E108L/V585R | P28S | E107L; E108L | | |
| L19F/P28S/L103P/C105A/ | L19F; | L103P; C105A; | D604R | 602 |
| E107L/E108L/D604R | P28S | E107L; E108L | | |
| L103P/C105A | | | | 580 |
| L103P/E107K | | | | 581 |
| C105A/E107K | | | | 582 |
| C105A/D402E | | | | 583 |
| C105A/V585R | | | | 584 |
| E107K/V585R | | | | 585 |
| E107K/D402E | | | | 586 |
| L103P/D402E | | | | 587 |
| L103P/V585R | | | | 588 |

[0262] In other examples, a variant SV40 TAg can include one that encodes an SV40 TAg that contain amino acid insertions or deletions, for example, compared to an SV40 TAg set forth in SEQ ID NO:564 (and encoded by an SV40 TAg set forth in SEQ ID NO:561). Exemplary of such variants are deletion mutations, for example, a nucleic acid molecule that encodes an SV40 TAg deletion mutant set forth in SEQ ID NO:603 or 604.

[0263] Corresponding nucleotide mutations in an SV40 TAg, such in an SV40 TAg set forth in SEQ ID NO:561, can be made by standard molecular biology techniques, which are routine to one of skill in the art. For example, wild-type SV40 TAg can be mutated by site-directed mutagenesis, such as by using a QuikChange site-directed mutagenesis kit (Strategene). Briefly, mutagenesis can be performed by designing a pair of oligonucleotides containing the mutations, hybridizing these oligonucleotides to the wild-type sequence, followed by re-synthesis of the gene using PCR. DpnI digestion of the PCR reaction result can eliminate the methylated template DNA. Subsequent transformation of newly PCR-synthesized plasmid into bacteria allows for amplification of the plasmid including the sequence with the desired mutation. After sequence verification, the mutated gene can be subcloned into a backbone or other vector as described herein.

[0264] 2. Therapeutic Genes

[0265] The oncovector constructs provided herein contain a therapeutic gene that supports cancer or tumor therapy. For example, the therapeutic gene can be a bystander gene. The therapeutic gene can be any that encodes a protein that has a known anti-tumorigenic property or activity, for example, one that encodes a protein that is associated with bystander effects on tumor cells. For example, the bystander gene, when expressed, can facilitate cell death of a cell in which it is expressed (the targeted cell) as well as in adjacent or nearby neighboring cells. For example, cell death can occur due to toxic effects caused by expression of the bystander gene, or via apoptosis, such as due to syncytia formation. Exemplary bystander genes are genes that encode fusogenic proteins or genes for pro-drug modifying enzymes.

[0266] Typically, the effects on neighboring cells are specific to tumor cells, and not to normal cells. For example, the bystander gene is one that produces a toxic compound that exhibits toxicity to tumor cells, but not to normal cells. In another example, a promoter can be included in the constructs herein such that the bystander genes are expressed in a tissue or cell-specific manner. For example, exemplary oncovector constructs provided herein include a tumor-specific promoter such that the bystander gene is only capable of being expressed in tumor cells, including in neighboring tumor cells. This is exemplified in FIG. 1, which exemplifies the expression of a fusogenic protein as an exemplary expressed bystander gene. Here, the bystander gene is not capable of being expressed in normal cells, and thus only induces fusion and multinucleation, and subsequent apoptosis and cell death, of tumor cells.

[0267] Exemplary bystander genes that can be included in the constructs are described below. These include, for example, bystander genes that encode fusogenic proteins or pro-drug modifying enzymes. This description below is exemplary only and is not meant to limit the particular therapeutic gene, for example bystander gene, that can be included in the constructs provided herein.

[0268] a. Gene Encoding a Fusogenic Protein

[0269] Constructs provided herein contain a fusogenic gene, which is a gene encoding a protein that causes fusion of two membranes. Protein-mediated membrane fusion is a key step in cellular processes such as exocytosis, protein trafficking, fertilization, and enveloped virus infection. Most fusogenic proteins known in the art are viral glycoproteins used to infect host cells, while some eukaryotic fusogenic proteins also are known (see Table 5). Some fusogenic proteins must be expressed from within both adjacent cells (e.g., eukaryotic SNARE proteins), while other fusogenic proteins require other proteins to function. Generally, fusogenic genes used in the constructs provided herein are any that function without the need for other proteins. Some of these “stand alone” fusogenic genes encode proteins that function as a result of mutations, which eliminates the need for additional proteins. Hence, nucleic acid molecules in the constructs provided herein also include those that encode modified fusogenic proteins due to amino acid substitutions, insertions and/or deletions to increase their fusogenic activity.

[0270] The groups of fusogenic proteins provided herein achieve membrane fusion by various mechanisms. For viral fusion proteins, there are three classes of fusion proteins: Class I viral fusion proteins have a prominent alpha-helical coiled region that forms a 6 helical bundle structure (forms a pore); class II viral fusion proteins have an alpha structure that is different from class II; and class III viral fusion proteins have combined features of class I and class II. All classes of viral fusion proteins are associated with similar conformational changes to achieve fusion. In general, in response to a trigger, they insert the hydrophobic fusion peptide or loops to attach to the target membrane, and then a fold-back occurs bringing the membranes together. For example, viral F and G proteins sometimes, but not always, work together where the G protein binds to a target cell receptor and the viral F protein undergoes a conformational change. In response to a trigger, F proteins insert the hydrophobic fusion peptide (or fusogenic peptide, described below) into the target membrane followed by a fold-back mechanism which brings the two membranes together. In contrast, reovirus FAST proteins are nonstructural, transmembrane proteins that induce membrane fusion by a different mechanism of action. Because of their low molecular masses (ranging from 10 kDa to 15 kDa) and lack of typical fusion protein motifs, FAST proteins most likely induce membrane fusion through a mechanism that is different from the mechanism described above for F proteins. Eukaryotic SNARE proteins form a four-bundle structure of β-helical coils. Membrane fusion occurs via a zippering mechanism, and proteins must be present on both opposing membranes.

[0271] Generally, for viruses a number of genes can be involved in virus-cell or cell-cell fusion. For example, for vaccinia virus (VACV), 8 genes are involved: A16, A21, A28, H2, L5 and J5. Genes A16, G9 and J5 also appear to be distantly related. For Herpes, at least 3-4 genes are involved in fusion: gH, gL, gQ1 and gQ2. For retroviruses and paramyxoviruses/paraninfluenza viruses, 2 genes typically are involved but instances of single genes taking over the function of both has been seen.

[0272] Fusogenic proteins encoded by genes contemplated for use in the oncovector constructs provided herein can be derived from viral or eukaryotic fusion proteins. Exemplary genes encode viral fusogenic proteins that include, but are not limited to, viral glycoproteins (F and G proteins, such as SV5F and VSV-G) and reovirus FAST proteins (e.g., Avian Reovirus p10, Reptilian Reovirus p14, and Baboon Reovirus p15). Eukaryotic fusogenic proteins include, but are not limited to, FF proteins (e.g., EFF-1, AFF-1), tetraspanin proteins, and SNARE proteins (e.g., Syntaxin, SNAP25, Synaptobrevin). Fusogenic proteins also include fusogenic peptides that can be activated by tumor specific proteases (see e.g. Walker et al. (1994) Protein Engineering, 7:91-7; Abi-Habib et al. (2006) Mol. Cancer. Ther., 5:2556-62). Fusogenic proteins also include tumor specific protease activated toxins (see e.g. Tcherniuk et al. (2005) Mol. Ther., 11:196-204).

[0273] Exemplary of genes for use in the constructs herein include any that encode a fusogenic protein set forth in Table 5. The Tables sets forth exemplary DNA sequences. The fusogenic genes can be modified for use in the constructs herein, such as to remove CpG motifs or for human codon optimization. Also, as described elsewhere herein, the sequences can be designed to contain terminal restriction site sequences for purposes of cloning into vectors.

TABLE 5

| | | SEQ ID |
|---|---|---|
| | SEQ ID | NO. |
| | NO. | (amino |
| Fusogenic Protein | (nucleotide) | acid) |
| Glycoproteins of Enveloped Viruses (F and G Proteins) | | |
| VSV-G (Vesicular stomatitis | 6 | 38 |
| virus G protein) | 7 | |
| | (CpG free) | |
| | 70 or 71 | |
| | (terminal | |
| | restriction sites) | |
| MV (Measles virus) F | | |
| SIV (Simian immunodeficiency | | |
| virus) F | | |
| HIV (Human immunodeficiency | | |
| virus) 1 + 2 F | | |
| MuLV (Murine leukemia virus) F | | |
| Chicken LV Env Protein | 26 | 52 |
| (NM_001099360) | 91 | |
| | (terminal | |
| | restriction sites) | |
| SER virus F | 27 | 53 |
| | 92 | |
| | (terminal | |
| | restriction sites) | |
| NDV (Newcastle disease virus) F | | |
| GALV (Gibbon ape leukemia | 15 | 43 |
| virus) F | | |
| | 16 | |
| | (CpG free) | |
| | 80 or 81 | |
| | (terminal | |
| | restriction sites) | |
| SV5 (Simian virus 5) F | 17 | 44 |
| | 18 | |
| | (CpG free) | |
| | 82 or 83 | |
| | (terminal | |
| | restriction sites) | |
| PPRV-F | 28, 29 | 54 |
| | 93 or 94 | |
| | terminal | |
| | restriction sites) | |
| Mumps F | | |
| Sendai virus F | | |
| HPIV 1, 2 and 3 (Human | | |
| parainfluenza virus types 1, | | |
| 2, and 3) F | | |
| CDV (Canine distemper virus) F | | |
| R'Pest F | | |
| SV41 (Simian virus 41) F | | |
| HRSV (Human respiratory syncytial | | |
| virus) F | | |
| Human endogenous retroviral-3 | 35 | 58 |
| (HERV-3) | 36 | |
| | (CPG free) | |
| | 100 or 101 | |
| | (terminal | |
| | restriction sites) | |
| Reovirus FAST proteins | | |
| Avian Reovirus p10 | 8 | 39 |
| | 9 | |
| | (CpG free) | |
| | 72 or 73 | |
| | (terminal | |
| | restriction sites) | |
| Avian Reovirus p10 (S1133 | 10 | 40 |
| variant V68I) | 11 | |
| | (CpG free) | |
| | 74, 75 | |
| Reptilian Reovirus p14 | 12 | 41 |
| | 13 | |
| | (CpG free) | |
| | 76 or 77 | |
| | (terminal | |
| | restriction sites) | |
| Baboon Reovirus p15 | 14 | 42 |
| | 78 | |
| | (terminal | |
| | restriction sites) | |
| Eukaryotic Membrane Fusion | | |
| Proteins | | |
| EFF-1 | | |
| AFF-1 | | |
| Tetraspanin Proteins | 30 | 55 |
| | 95 | |
| | (terminal | |
| | restriction sites) | |
| Yeast G Protein | | |
| Syncytin 1 | 31, 32 | 56 |
| | 96 or 97 | |
| | (terminal | |
| | restriction sites) | |
| Syncytin 2 | 33, 34 | 57 |
| | 98, 99 | |
| | (terminal | |
| | restriction sites) | |
| Syntaxin (SNARE) | | |
| SNAP25 (SNARE) | | |
| Synaptobrevin (SNARE) | | |

[0274] i. Exemplary Viral Fusogenic F Proteins and Variants

[0275] Viral fusogenic F proteins contemplated for use in the oncovector constructs provided herein include, but are not limited to, Paramyxo/Parainfluenza F proteins such as, for example, SER virus F protein, SV5F, NDV F, Mumps F, Measles F, and variants and/or portions thereof that exhibit fusogenic activity. In viral fusogenic F proteins, the F protein is synthesized as an inactive precursor, F0, that is posttranslationally cleaved by a host protease into two disulfide-linked subunits called F1 and F2. The cleavage of F is required for virus-cell and cell-cell membrane fusion and also for viral infection. A well-conserved hydrophobic domain (fusogenic peptide) at the amino terminus of F1 is exposed by the cleavage and is involved in the fusion event. The F2 subunit contains that TM region. Three heptad repeat (HR) domains are found in the F1 ectodomain. HR1 is immediately adjacent to the carboxyl terminus of the fusion peptide, while HR2 is close to the transmembrane (TM) domain; HR3 is located between the HR1 and HR2 domains. The F1 subunits alpha-helical hydrophobic fusion peptide is inserted into the membrane, and an activation causes the F protein to ratchet the membranes together (fold-back). In some viruses, the hemagglutinin-neuraminidase protein (HN) is the attachment protein, which is often required to mediate the fusion of the F gene. Hence, mutations can be included that encode a fusogenic protein that alleviate the necessity for the HN protein. Also, in some viruses, the F2 subunit often contains an inhibitory F2 COOH-terminal R peptide that prevents cytotoxicity of the infected cell. The cytoplasmic tail (CT) domain of viral F proteins also has been shown to play a regulatory role in membrane fusion.

[0276] Viral fusion proteins can vary in one or more of the above mechanisms. For example, exemplary of a fusogenic gene for use in the constructs herein are nucleic acid molecules that contain the gene that encodes SV5F or variants thereof. The gene that encodes SV5F corresponds to nucleotides 4530-6118 of the nucleotide sequence set forth in SEQ ID NO:490 (GenBank Accession No. NC_{—}006430). A sequence of the gene is set forth in SEQ ID NO:17 and encodes an amino acid sequence set forth in SEQ ID NO:44. Genes that encode SV5F also can include modified forms thereof. For example, a CpG modified sequence encoding SV5F is set forth in SEQ ID NO:18 and 82. Other modified forms are described below. The SV5F fusion protein is fusogenic, and deletion of the CT ablates the fusogenic activity. SV5F is active at neutral pH. Strains of SV5F also have differing requirements for HN for activity. For example, encoded SV5F from strain W3A (SEQ ID NO:44) exhibits fusogenic activity without coexpression of HN, whereas SV5F from strain WR requires coexpression of HN for fusion activity. SV5F strains W3A and WR differ by three amino acid residues corresponding to positions 22, 443, and 516 of SEQ ID NO:44 (the W3A SV5F protein contains residues P22, S443, and V516 whereas the WR SV5F protein contains L22, P443, and A516).

[0277] In a further example, exemplary of a fusogenic gene for use in the constructs herein are nucleic acid molecules that contain a gene that encodes Reptilian Reovirus p14 (RRVp14), and Baboon Reovirus p15 (BRVp15). The gene that encodes Reptilian Reovirus p14 corresponds to nucleotides 25-402 of the nucleotide sequence set forth in SEQ ID NO:548 (GenBank Accession No. DD038189). A sequence of the gene is set forth in SEQ ID NO:12 or 13 and encodes an amino acid sequence set forth in SEQ ID NO:41.

[0278] In a further example, exemplary of a fusogenic gene for use in the constructs herein are nucleic acid molecules that contain a gene that encodes Baboon Reovirus p15 (BRVp15). The gene that encodes Baboon Reovirus p15 corresponds to nucleotides 25-447 of the nucleotide sequence set forth in SEQ ID NO:489 (GenBank Accession No. AF406787). A sequence of the gene is set forth in SEQ ID NO:14 and encodes an amino acid sequence set forth in SEQ ID NO:42.

[0279] In one example, exemplary of a fusogenic gene for use in the constructs herein are nucleic acid molecules that contain a gene that encodes the Avian Reovirus p10 (ARVp10) fusogenic protein such as set forth in SEQ ID NO:8 (GenBank Accession No. AY395797) or 9 and encoding a fusion protein set forth in SEQ ID NO:39 or variants thereof. For example, a variant of ARVp10, derived from a natural mutation in strain ARV-S1133 (SEQ ID NO: 525; Genbank AF330703). The gene that encodes a variant of Avian Reovirus p10, derived from a natural mutation in strain ARV-S1133 resulting in a V68I amino acid substitution, corresponds to nucleotides 25-321 of the nucleotide sequence set forth in SEQ ID NO:525 (GenBank Accession No. AF330703). This mutant V68I has been observed to have a greater fusogenic behavior. A nucleic acid sequences encoding the ARV-S1133 variant is set forth in SEQ ID NO:10 or 11 (CpG free) and encodes a fusogenic protein set forth in SEQ ID NO:40.

[0280] In a further example, exemplary of a fusogenic gene for use in the constructs herein are nucleic acid molecules that contain a gene that encodes VSV-G fusion protein. The gene that encodes VSV-G corresponds to nucleotides 1420-2955 of the nucleotide sequence set forth in SEQ ID NO:524 (GenBank Accession No. AJ318514). A sequence of the gene is set forth in SEQ ID NO:6 or 7 and encodes an amino acid sequence set forth in SEQ ID NO:38.

[0281] In another example, exemplary of a fusogenic gene for use in the constructs herein are nucleic acid molecules that contain the gene that encodes a SER Virus fusion protein or variants thereof. A sequence of the gene is set forth in SEQ ID NO:27 and encodes an amino acid sequence set forth in SEQ ID NO:53. Further variants or modified forms are contemplated. The SER Virus is not fusogenic because it contains extra amino acids. A SER Virus lacking the cytoplasmic tail portion, however, is fusogenic. Mutants also can be generated that do not require HN. Also, it is active at neutral pH.

[0282] Also provided herein are oncovector constructs containing genes encoding mutant viral F proteins. The mutations in the F protein generally enhance or increase the fusogenic activity of the encoded viral protein. For example, the included genes can encode F proteins that can contain mutations in the N-terminal fusogenic peptide of the F1 subunit that is involved in penetrating the membrane. In another example, the included genes can encode F proteins that do not require the hemagglutinin-neuraminidase protein (HN) is the attachment protein, which is often required to mediate the fusion of the F gene. In a further example, genes can encode fusogenic proteins that have deletions of the cytoplasmic tail (CT) that enhance fusogenic activity in some F proteins.

[0283] For example, F proteins with mutations in the N-terminal fusogenic peptide portion of the F1 subunit can be used. This region is a twenty amino acid hydrophobic α-helix which penetrates the lipid membrane and anchors it. Exemplary twenty amino acid fusogenic F1 peptide sequences are set forth in SEQ ID NOs:59-69 for SV5F, HPIV2, SV41, MUMPS, MV, R PEST, CDV, HPIV1, HPIV3, NDV and Sendai F proteins, respectively (Horvath and Lamb, J Virol 66:2443-55 (1992)). Glycines, for example, are known to be disruptive to α-helixes. Thus, Gly to Ala substitutions, for example, can increase the fusogenic activity of F proteins by improving the α-helix structure (Bagai and Lamb, Virology 238:283-90 (1997); Russell et al., J Virol 78:13727-42 (2004)). Any fusogenic gene encoding a viral F protein with a Gly to Ala substitution or plurality of Gly to Ala substitutions in the fusogenic peptide can be used in the oncovector constructs provided herein. For example, a gene encoding an SV5F protein variants with one or more Gly to Ala substitutions in the fusogenic peptide portion of the F protein (corresponding to amino acids 103-122 of the amino acid sequence set forth in SEQ ID NO:44) can be used. In particular, genes encoding SV5F protein variants with Gly to Ala substitutions at positions 3, 7 and/or 12 of the twenty amino acid fusogenic peptide (corresponding to Gly to Ala substitutions at positions 105, 109 and 115 of the SV5F protein set forth in SEQ ID NO:44) and all possible combinations of these mutations, can be used. Exemplary SV5F protein variants (nucleic acid and encoding protein) are presented in Table 6.

TABLE 6
SV5F Fusogenic Peptide Variants

| | Nucleic Acid | | |
|---|---|---|---|
| | SEQ ID NO | | |
| | | terminal | Protein |
| | | restriction | SEQ ID |
| | | site | NO |
| WT | 17, 18 | 82, 83 | 44 |
| G105A | 19 | 84 | 45 |
| G109A | 20 | 85 | 46 |
| G114A | 21 | 86 | 47 |
| G105A/G109A | 22 | 87 | 48 |
| G105A/G114A | 23 | 88 | 49 |
| G109A/G114A | 24 | 89 | 50 |
| G105A/G109A/G114A | 25 | 90 | 51 |

[0284] As noted above, some fusogenic proteins require other proteins to function. For example, some F proteins require coexpression the Hemagglutinin-neuraminidase protein (HN) attachment protein to mediate membrane fusion activity. However, variations among viral strains and mutations known in the art within certain F proteins can alleviate the necessity for the HN protein. Nucleic acids encoding such mutant viral F proteins or strain variants can be used in the oncovector constructs provided herein. The encoded mutations can be within the fusogenic peptide or within the F2 subunit COOH-terminal region (R peptide). Examples of genes encoding fusogenic proteins containing mutations that negate the requirement for coexpression of the HN protein to induce membrane fusion include, but are not limited to, genes encoding an SER virus F mutant (L539A/L548A, L548V, L548G corresponding to positions set forth in SEQ ID NO:53); NDV mutant (L289A); MuLV (R peptide mutations); and GALV (R peptide mutations). The need for HN coexpression also varies among fusogenic proteins from different strains.

[0285] As noted, the cytoplasmic tail (CT) domain of viral F proteins also has been shown to play a regulatory role in membrane fusion. For example, F-protein CT truncations (−CT) in Newcastle disease virus (NDV) result in highly reduced fusogenic activity. CT truncations in SV5F proteins abolish fusogenic activity. CT truncations also can enhance fusogenic activity in some F proteins. For example, truncations or mutations in the CT domain of the MV, SIV, HIV 1 and 2, MuLV, and SER virus F proteins were found to enhance fusogenic activity.

[0286] b. Gene Encoding a Prodrug Converting Enzyme

[0287] Provided herein are oncovector constructs containing genes encoding prodrug modifying elements. A pro-drug is a compound that, on administration, must undergo chemical conversion by metabolic processes before becoming the pharmacologically active drug for which it is a prodrug. Pro-drug modifying elements carry out this conversion. For example, the herpes simplex 1 thymidine kinase gene (HSV-TK) which can covert the pro-drug ganciclovir (GCV) into a toxic metabolite, thereby killing the cell which expresses the TK gene. If the expression of HSV-TK is coupled to the differential expression of the tumor-specific promoter, such as those provided herein, this gene activity can result in selective cellular toxicity of the tumor cells. This strategy can be employed within the vector containing both the fusogenic gene and the TAg, or in a self-replicating vector where TAg is expressed along with HSV-TK.

[0288] Such prodrug converting enzymes include, but are not limited to the HSV-TK polypeptide, which converts ganciclovir to a toxic nucleotide analog. An exemplary sequence of HSV-TK is set forth in SEQ ID NO: 498 and encodes a protein set forth in SEQ ID NO:501. A codon-optimized and CpG free HSV1-TK gene is set forth in SEQ ID NO:499. In particular, provided herein are nucleic acid constructs that contain a synthetic TK transcription unit containing a cell cycle dependent promoter, an HSV1-TK gene that has been codon optimized and is CpG free, a synthetic pA sequence (see e.g. SEQ ID NO:497). The sequence set forth in SEQ ID NO:497 also contains restriction site sequence such that digestion with Pf1F1 and Bg12 can permit insertion into a backbone construction provided herein, and in particular the backbone intermediate 4 vector. It is understood, however, that the particular sequence can be adapted and modified for cloning into any desired plasmid or vector using standard recombinant DNA techniques.

[0289] Another exemplary pro-drug modifying enzyme is cytosine deaminase (CD), which converts the non-toxic nucleotide analog 5-fluorocytosine into a toxic analog, 5-fluorouracil (Yazawa et al., 2002). An exemplary gene sequence for CD is set forth in SEQ ID NO:500 and encodes a protein set forth in SEQ ID NO:502. Another exemplary prodrug-modifying enzyme is cytochrome p450, which converts certain aliphatic amine N-oxides into toxic metabolites.

[0290] 3. Promoter

[0291] Constructs provided herein contain one or more promoters to drive expression of nucleic acid sequences contained therein. Typically, the promoter is operatively linked to one or more than one nucleic acid molecule. Where more than one promoter is used in the construct, the promoter can be the same or different. The promoter can be endogenous or heterologous to the gene or sequence.

[0292] For example, a construct can contain a first promoter operatively linked to a first nucleic acid sequence (e.g., replication initiator) and a second promoter operatively linked to a second nucleic acid sequence (e.g. fusogenic sequence). In some cases, a construct also can contain a third promoter operatively linked to a third nucleic acid sequence (e.g. an adjunct tumor therapeutic gene) and so on.

[0293] In other examples, constructs provided herein can contain a single promoter that drives the expression of one or more nucleic acid molecules. Such promoters are said to be multicistronic (bicistronic or tricistronic, see e.g., U.S. Pat. No. 6,060,273). In instances of multicistronic expression, it is contemplated that internal ribosome entry site (IRES) can be used, which aid in the initiation of translation internally.

[0294] A promoter used in the constructs provided herein can be functional in a variety of tissue or cell types and in several different species or organisms. Alternatively, its function is restricted to a particular species and/or a particular tissue or cell type. Further, a promoter can be constitutively active, or it can be selectively activated in certain cells or tissues, for example, due to the presence of a cell-type (e.g. tumor) or tissue-specific factor. Such promoters are known to one of skill in the art. Papadakis et al. (Current Gene Therapy (2004) 4:89-113) describes exemplary tissue and disease-specific promoters, including tumor-specific promoters.

[0295] Generally, promoters contained in the constructs provided herein are tissue-specific or cell-specific promoters. Such promoters include, but are not limited to, those that are active in heart, lung, esophagus, muscle, intestine, breast, prostate, stomach, bladder, liver, spleen, pancreas, kidney, neurons, myocytes, leukocytes, immortalized cells, neoplastic cells, tumor cells, cancer cells, duodenum, jejunum, ileum, cecum, colon, rectum, salivary glands, gall bladder, urinary bladder, trachea, larynx, pharynx, aorta, arteries capillaries, veins, thymus, mandibular lymph nodes, mesenteric lymph node, bone marrow, pituitary gland, thyroid gland, parathyroid glands, adrenal glands, brain, cerebrum, cerebellum, medulla, pons, spinal cord, sciatic nerve, skeletal muscle, smooth muscle, bone, testes, epididymides, prostate, seminal vesicles, penis, ovaries, uterus, mammary glands, vagina, skin, eyes or optic nerve.

[0296] Exemplary cell-specific promoters include, for example, endothelial nitric oxide synthase (eNOS) promoter expressed in endothelial cells (Guillot, P. V. et al. (199) J. Clin. Invest. 103:799-805); vascular endothelial growth factor (VEGF) receptor (flk1) promoter expressed in endothelial cells (Kappel et al. (1999) Blood, 93:4282-4292); insulin promoter expressed in beta cells of the pancreas (Ray et al., J. Surg. Res. (1999) 84:199-203); promoter of gonadotropin-releasing hormone receptor gene expressed in cells of the hypothalamus (Albarracin et al. (1999) Endocrinology, 140:2415-2421); matrix metalloproteinase 9 promoter expressed in osteoclasts and keratinocytes (Munant et al., (1999) J. Biol. Chem., 274:5588-5596); promoter of parathyroid hormone receptor expressed in bone cells (Amizuma et al. (1999) J. Clin. Invest., 103:373-381); and dopamine beta-hydroxylase promoter expressed in noradrenergic neurons (Yang et al., (1998) J. Neurochem. 71:1813-1826).

[0297] Cell-specific promoters also include tumor-specific promoters. Tumor-specific promoters include, for example, cell-cycle dependent promoters that are regulated by cell cycle genes. Typically, tumor cells have runaway cell cycle, and thus cell cycle-dependent gene promoters are highly active in tumor cells versus normal cells in which these promoters are repressed. For example, the tumor suppressor genes p53 and retinoblastoma (Rb) proteins are deleted or mutant in greater than 50% of human cancers, but not in normal cells. It is for this reason that elements of the cell-cycle dependent gene promoters are being utilized as differentially expressing promoters for expression in tumor cells and repression in normal cells. This phenomenon has been observed and/or utilized for various oncolytic viruses (Jounaidi et al. (2007) Curr Cancer Drug Targets, 7:285-301; Markert et al. (2000) Gene Ther., 7:867-74).

[0298] Other tumor-specific promoters are known to those of skill in the art (see e.g., Hardcastle J et al. (2007) Current Cancer Drug Targets, 7: 181-189. These include, but are not limited to, promoters that have been derived from genes that encode tyrosinase (allowing for targeting to melanoma; see e.g., Vile, R. G. and Hart, (1993) Cancer Res., 53:962-967; Vile, R. G. and Hart I. R., (1994) Ann. Oncol 5 (Suppl. 4):S59-S65; Hart, I. R. et al., (1994) Curr. Opin. Oncol., 6:221-225); c-erbB-2 oncogene (targeting to breast, pancreatic, gastric and ovarian cancers; see e.g., Hollywood D and Hust H (1993) EMBO J, 12:2369-2375); carcinoembryonic antigen (CEA) (targeting to lung and gastrointestinal malignancies, including colon, pancreatic and gastric cancer; see e.g., Thompson, J. A. et al. (1991) J. Clin. Lab. Anal., 5:344-366; Osaki T et al. (1994) Cancer Res., 54:5258-5261); DF3/MUC1 (targeting to breast cancer; see e.g., Abe M and Kufe D (1993) Proc. Natl. Acad. Sci. USA, 90:282-286); Manome Y et al. (1995) Gene Ther. 2:685, A051; Chen L et al. (1995) J. Clin. Invest., 96:2775-2782); prostate specific antigen (PSA) (targeting to prostate cancer; see e.g., Lundwall, A (1989) Biochem. Biophys. Res. Commun., 161:1151-1156); and alpha-fetoprotein (AFP) (targeting to hepatocellular carcinoma; see e.g., Arbuthnot P et al. (1995) Hepatology, 22:1788-1796; Ido et al. (1995) Cancer Res., 55:3105-3109); L-plastin (LP-P) (targeting to epithelial-derived tumors; see e.g., Chung et al. (1999) Cancer Gene Ther., 6:99-106); α-lactalbumin (ALA) (targeting to breast cancer; see e.g., Anderson et al. (2000) Cancer Gene Ther., 7:845-852); midkine (MK) (targeting to pancreatic cancer; see e.g., Yoshida et al. (2002) Anticancer Res., 22:117-120); cyclooxygenase-2 (COX-2) (targeting gastrointestinal cancer; see e.g., Yamamoto et al., (2001) Mol. Ther., 3:385-394; Wesseling et al. (2001) Cancer Gene Ther., 8:990-996); probasin (ARR2PB) (targeting prostate cancer; see e.g., Lowe et al. (2001) Gene Ther., 8:1363-1371; Rubinchik et al. (2002) Gene Ther., 8:247-253); hypoxic response elements (HRE) (not tissue specific; see e.g., Dachs et al. (2000) Eur. J. Cancer, 36:1649-1660; Ruan H et al. (2001) Curr Opin Invest Drugs, 2:839-843); hTERT (not tissue specific; see e.g., Gu et al. (2000) Cancer Res., 60:5359-5364; Koga et al. (2000) Hum. Gene Ther., 11:1397-1406; Lin et al. (2002) Cancer Res., 62:3620-3625; Majumdar et al. (2001) Gene Ther., 8:568-578; Fujiwara T et al. (2007) Current Cancer Drug Targets, 7: 191-201); promoters that target the angiogenic tumor vasculature, for example, flt-1, flk1/KDR, E-selectin, endoglin, ICAM-2, preproendothelin 1 (PPE-1) (see e.g., Jaggar et al. (1997) Hum. Gene Ther., 8:2239-2247; Walton et al. (1998) Anticancer Res., 18:1357-1360; Savontaus et al. (2002) Gene Ther., 9:972-979; Bauerschmitz et al. (2002) Cancer Res., 62:1271-1274; Velasco et al. (2001) Gene Ther., 8:897-904; Varda-Bloom et al. (2001)); prolactin (PRL) (targeting pituitary tumors; see e.g., Southgate et al. (2000) Endocrinology, 141:3493-3505); osteocalcin 2 (targeting osteosarcoma; see e.g., Barnett et al. (2002) Mol. Ther., 6:377-385); survivin (Van Houdt et al., (2006) J Neurosurg. 104(4):583-592); CXCR4 tumor-specific promoters (Ulasov I V et al. (2007) Cancer Biology and Therapy, 65:675-689; Zhu, Z B et al. (2006) J Thorac. Oncol., 1:701-711); and human papilloma virus 16 (Delgado-Enciso et al. (2007) J of Gene Medicine).

[0299] The level of expression of a gene under the control of a particular promoter can be modulated by manipulating the promoter region. For example, different domains within a promoter region can possess different gene-regulatory activities. For example, promoters typically bind one or more transcription factors that are able to regulate transcription. Thus, promoters can be modified to alter the configuration of regulatory binding regions, such as for transcription factors and/or can be made to have specific regions deleted. Such mutational and deletional analysis can be rationally or empirically performed and the resulting constructs tested by one of skill in the art. For example, the various modified promoter constructs can be tested in a construct whereby the modified promoter is operatively linked to a reporter gene, such as EGFP, which can be used to determine the activity of each promoter variant under different conditions. Application of such a mutational and deletional analysis enables the identification of promoter sequences containing desirable activities and thus identifying a particular promoter domain, including core promoter elements. This approach can be used to identify, for example, the smallest region capable of conferring tissue or cell specificity.

[0300] a) Cell-Cycle Dependent Promoters

[0301] Cell-cycle dependent promoters include those that are regulated by tumor suppressor proteins, such as RB family proteins or p53. Included among these are E2F responsive promoters. The E2F transcription factor (sometimes referred to as E2F protein or E2F) can regulate expression of numerous genes effecting cellular proliferation including proto-oncogenes and genes regulating cell cycle progression. For example, E2F is a binding target of retinoblastoma (RB) family of tumor suppressors including p107, p103 and pRb itself. In growth-arrested cells, the pRb family of proteins (pRB, p107 and p130) can mediate transcriptional repression in at least two ways: via direct repression domains and by recruiting the activity of the protein RBP1, which directly represses transcription and indirectly represses transcription by recruiting HDAC. In normal tissues, E2F responsive promoters are typically repressed by RB family/E2F such as pRb/E2F or p130/E2F. The ability of pRB to act as a growth suppresser is linked to this property (Sellers, W. R. et al. (1995) Proc. Natl. Acad. Sci. U. S. A. 92: 11544-11548). In dividing cells, pRB family members are no longer bound to E2F, thus allowing for transcriptional activation of promoters containing E2F binding sites.

[0302] E2F responsive promoters are characterized by the presence of E2F consensus sites, which can show homology with the CDE/CHR bipartite repressor element. For example, many E2F responsive promoters contain a GC-rich E2F binding motif (CDE) and a few nucleotides downstream a TGG/A motif, designated as CHR. The E2F consensus site can be either activating or repressing depending on the presence of a canonical TATA box (Tommasi et al. (2007) J Biol. Chem., 272:30483-30490). Typically, E2F responsive promoters contained in the oncovector constructs provided herein are TATA-less promoters, thereby repressing transcription in the presence of repressor proteins such as E2F/Rb or E2F/p130. Exemplary of such promoters include, but are not limited to, cycA (SEQ ID NO:519), cdc2 (SEQ ID NO:520), cdc25 (SEQ ID NO:521), B-myb (SEQ ID NO:522), E2F-1 (SEQ ID NO:506), p107 (SEQ ID NO:523), HsOrc1, adenoE1A. Promoters from the genes TK (SEQ ID NO:526), DNA pol alpha (SEQ ID NO:527), H2A (SEQ ID NO:528), and C-myc (SEQ ID NO:529) also can be utilized if the TATA box is deleted.

[0303] Another mechanism of cell-cycle dependent repression is via the presence of CAT boxes (CCAAT motifs; SEQ ID NO:509) to which nuclear factor Y (NF-Y) complexes bind. The p53 tumor suppressor protein then binds to these bound complexes resulting in gene repression. Thus, under normal conditions, NF-Y and p53 are co-resident on promoters containing CAT boxes, and lacking p53 binding sequences. This ultimately results in repression of transcription via acetylation of c-terminal lysines on p53, the recruitment of HDACs, de-acetylation of histones and release of PCAF and p300 from the promoters. Exemplary promoters containing CAT boxes regulated by NF-Y/p53 complexes include G2/M promoters such as, but not limited to, cdc25, cyclin B1, cyclin B2, Cdc2, topoisomerase IIα (Imbriano et al. (2005) Mol. Cell. Biol., 25:3737-3751). E2F-1 also contains CAT boxes, and is regulated by p53.

[0304] Exemplary of a cell-cycle dependent promoter used in the oncovector constructs provided herein is the E2F1 promoter, and variations thereof. E2F1 is regulated by both RB family members and p53 to mediate repression of transcription in normal cells, but not in tumor cells that are deficient or mutant in any one or more of the RB family (pRB, p130 or p107) or p53 genes. E2F1 is derived from the E2F gene (5′ DNA sequence set forth in SEQ ID NO:483; GenBank Accession No. S74230). The nucleotide sequence of the E2F1 promoter corresponds to nucleotides 1194 to 1460 in the sequence of nucleotides set forth in SEQ ID NO:483. A variant nucleic acid sequence for the EF2 5′UTR is set forth in SEQ ID NO:506; GenBank Accession No. 579170 (see also SEQ ID NO:534). The nucleotide sequence of the E2F1 promoter corresponds to nucleotides 37 to 303 in the sequence of nucleotides set forth in SEQ ID NO:506. The nucleotide sequence of the E2F1 promoter corresponding to nucleotides 1194 to 1460 in the sequence of nucleotides set forth in SEQ ID NO:483 contains a cysteine (C) nucleotide at position 1250 (corresponding to nucleotide position 57 in the E2F1 promoter), whereas the nucleotide sequence of the E2F1 promoter corresponding to nucleotides 37 to 303 in the sequence of nucleotides set forth in SEQ ID NO:506 contains a thymine (T) nucleotide at position 93 (corresponding to nucleotide position 57 in the E2F1 promoter). A further variation in the E2F1 promoter is set forth in SEQ ID NO:535, which contains a thymine (T) nucleotide at position 262 (corresponding to nucleotide position 256 in the E2F1 promoter). As depicted in Table 7, the E2F1 promoter is characterized by putative binding sites for MBF-1, Sp1 and NF-kB. The E2F1 promoter also includes two canonical CAAT boxes (CAT boxes) and two palindromic E2F-binding sites. The promoter does not contain a TATA motif nor an initiator element. Hence, repression of transcription from the E2F1 promoter is mediated in an ETF/Rb family and p53-dependent manner.

[0305] E2F1 promoters provided herein can be modified. For example, E2F promoters can be modified to remove CpG motifs, for example TCG can be removed. Exemplary E2F1 promoters with optimal central TLR9 motifs removed are set forth in SEQ ID NOs:536-537. As depicted in Table 7 below, the CpG motifs are removed in regions between the transcription factor binding sites. Thus, the CpG modified E2F1 promoter (E2F-279-TCG) retains the same pattern of transcription factor binding sites as the wild-type E2F1 (E2F-WT279). In another example, a chimeric b-myb E2F can be designed to reduce CG. This is exemplified in the E2F1 promoter designated E2F-Syn216 and set forth in SEQ ID NO:538.

[0306] In some embodiments, the E2F1 promoter can be modified to increase the number of enhancer elements and/or to modulate sites for p53- or Rb family-mediated repression. For example, extra enhancer elements, such as SP-1, can be added. In one example, such enhancer elements can be spaced in intervals of about or equal to 10 bp allowing the proteins that bind to the sequences to line up on the same side of the DNA, since one turn of the alpha helix is approximately 10 bps. In another example, extra CAT boxes can be designed to provide more locations for p53-induced repression. In other examples, extra CHR elements can be included to increase the amount of E2F-based repression.

[0307] Any of the above modifications can be combined in the creation of a modified E2F1 promoter. Exemplary of such an E2F1 promoter is designated E2F-Syn216 corresponding to nucleotides 7-210 of the nucleic acid sequence set forth in SEQ ID NO:538. The E2F-Syn216 promoter contains replacement of CAT boxes every 40 bp and the addition of extra SP-1 sites. In addition, in the E2F-Syn216 promoter, the first E2F site is replaced with the B-myb/CHR combination as noted above in order to reduce CpG motifs.

[0308] Further, E2F1 promoters, including modified E2F1 promoters, can be generated as truncation variants to titer responses down to the amount of desired activity. The deletion variants are designed to provide decreasing strengths to each promoter. For example, promoters can be too strong in some cells such that they have deleterious effects on normal cells ultimately affecting the level of expression therefrom. The truncated promoters provided herein can be used to titer the expression down (lower the base line expression) so as to protect normal cells from deleterious effects. Exemplary of such truncated promoters are set forth in Table 7.

TABLE 7

| | | SEQ ID |
|---|---|---|
| Promoter | Motifs | NO |
| E2F-WT279 | E2F-like boxes MBF1 SP1 SP1 SP1 CAT | 534 |
| | CAT E2F CHR E2F CHR NFKB SP1 | |
| E2F-279-TCG | E2F-like boxes MBF1 SP1 SP1 SP1 CAT | 536 |
| | CAT E2F CHR E2F CHR NFKB SP1 | |
| E2F-WT216 | MBF1 SP1 SP1 SP1 CAT CAT E2F CHR | |
| | E2F CHR NFKB SP1 | |
| E2F-Syn216 | CAT SP1 SP1 CAT SP1 SP1 CAT SP1 CAT | 538 |
| | B-myb E2F CHR E2F CHR NFKB CAT SP1 | |
| E2F-Syn141 | SP1 CAT SP1 CAT B-myb E2F CHR E2F | 539 |
| | CHR NFKB CAT SP1 | |
| E2F-Syn109 | SP1 CAT B-myb E2F CHR E2F CHR NFKB | 540 |
| | CAT SP1 | |
| E2F-Syn63 | E2F CHR NFKB CAT SP1 | 541 |

[0309] Generally, any cell-cycle dependent promoter provided herein, including any E2F1 promoter or modified E2F1 promoter, is responsive to Rb family- (pRb, p130 or p107) or p53-mediated repression. Thus, such promoters are active in cells not expressing or mutant in p53 or Rb, but are repressed in normal cells. One of skill in the art can test such promoters in in vitro or in vivo systems, described herein in Section F. For example, cell lines deficient in such tumor suppressor genes can be used to test the activity of the promoter, compared to normal cells containing tumor suppressor genes. The E2F-responsive promoter does not have to be the full-length or wild type promoter, but should have a tumor-selectivity of at least 3-fold, at least 5-fold, at least 10-fold, at least 20-fold, at least 30-fold, at least 50-fold, at least 100-fold or even at least 300-fold. Tumor-selectivity can be determined by a number of assays using known techniques, such as the techniques employed in WO 02/067861

[0310] 4. Other Elements

[0311] a. Regulatory Elements

[0312] Any of the oncovector constructs provided herein can contain one or more regulatory elements. Typically, regulatory elements are nucleic acid sequences that regulate the expression of other nucleic acid sequences at the level of transcription and/or translation. Thus, regulatory elements include, without limitation, promoters, operators, enhancers, ribosome binding sites, transcription termination sequences (i.e., a polyadenylation signal), T2A and other elements known to one of skill in the art. In addition, regulatory elements can be, without limitation, synthetic DNA, genomic DNA, intron DNA, exon DNA, and naturally-occurring DNA as well as non-naturally-occurring DNA.

[0313] i. IRES

[0314] The oncovector constructs provided herein contain one or more genes under the control of a conditional promoter. In embodiments where the expression of two or more genes is driven by a single promoter, an internal ribosome entry site (IRES) element can be included between coding sequences. The function of an IRES element is to enable the translation of two or more genes from one mRNA molecule, thus creating a bi-cistronic, tri-cistronic or poly-cistronic transcriptional/translational unit. Typically, eukaryotic translation can only be initiated at the 5′ end of the mRNA molecule. IRES elements form three dimensional structures (through sequence hybridization) that can directly or indirectly bind the 40S ribosomal subunit in such a way that their initiator codons are located in ribosomal P-site, allowing initiation of translation of mRNAs without the need for 5′ cap recognition.

[0315] IRES elements for the oncovector constructs provided herein can be derived from various organisms. Generally, IRES elements will be selected from among viral IRES elements. IRES elements contemplated for use in the oncovector constructs provided herein include, but are not limited to, IRES elements from Poliovirus, Rhinovirus, Encephalomyocarditis virus, Foot-and-mouth disease virus, Hepatitis A virus, Hepatitis C virus, Classical swine fever virus, Bovine viral diarrhea virus, Moloney murine leukemia (MMLV), Human immunodeficiency virus, Plautia stali intestine virus, Rhopalosiphum padi virus, Cricket paralysis-like virus, Triatoma virus, and Kaposi's sarcoma-associated herpesvirus. An exemplary IRES element is derived from the Cricket paralysis-like virus (CPLV IRES; set forth in SEQ ID NO:103) or Encephalomyocarditis virus EMCV (set forth in SEQ ID NO:104).

[0316] IRES elements provided herein can be modified. For example, IRES elements can be modified to remove or reduce the number of CpG motifs. Typically, IRES elements will be CpG modified such that the nucleotide substitutions in the hybridization regions still maintain the proper match and thus do not disrupt the three dimensional structure necessary for IRES function. An exemplary CPLV IRES element with CpG motifs removed is set forth in SEQ ID NO:102.

[0317] ii. Polyadenylation Signal

[0318] Expressed gene elements in the oncovector constructs provided herein generally will have a polyadenylation (pA) signal attached to the 3′ end of the coding sequence of the gene. The pA signal also can be included as part of a bi-, tri- or poly-cistronic transcriptional/translational unit. Typically, the pA signal is placed at the 3′ terminal end of such units. Polyadenylation signals initiate transcription termination and direct the addition of approximately 200-250 adenosine residues to the 3′ end of the mRNA transcript. Polyadenylation of mRNA molecules enhances RNA stability and translation. For example, the polyadenosine (poly-A) tail protects the mRNA molecule from exonucleases and promotes export of the mRNA from the nucleus.

[0319] Polyadenylation occurs after transcription of DNA into RNA in the nucleus. After the polyadenylation signal has been transcribed, the mRNA chain is cleaved through the action of an endonuclease complex associated with RNA polymerase. The cleavage site is characterized by the presence of the base sequence AAUAAA (SEQ ID NO:197) near the cleavage site. After the mRNA has been cleaved, 50 to 250 adenosine residues are added to the free 3′ end at the cleavage site. This reaction is catalyzed by polyadenylate polymerase.

[0320] Polyadenylation signal elements contemplated for use herein can be any nucleotide sequence that functions as a pA signal in the manner described herein or any pA signal element known in the art (e.g., SV40 early and late pA). Exemplary pA signals are set forth in SEQ ID NOs:191-196. Polyadenylation signal elements provided herein can be modified. For example, pA elements can be modified to remove or reduce the number of CpG motifs. An exemplary pA element with CpG motifs removed is set forth in SEQ ID NO:194.

[0321] b. Reporter Genes

[0322] Any of the constructs provided herein also can contain one or more reporter genes, that allow for the selection, identification or detection of reporter constructs and expressed genes therefrom. The reporter gene can encode a reporter protein, including, but not limited to, chloramphenicol acetyl transferase (CAT), β-galactosidase (encoded by the lacZ gene), luciferase, alkaline phosphatase, fluorescent protein, such as a green fluorescent protein (GFP) or red fluorescent protein (RFP), and horse radish peroxidase. A construct provided herein also can be constructed to contain a gene encoding a product conditionally required for survival (e.g., an antibiotic resistance marker). For example, a construct can contain nucleic acid that encodes a polypeptide that confers resistance to a selection agent such as neomycin (also called G418), puromycin, or kanamycin. Exemplary reporter genes encode EGFP and are set forth in SEQ ID NO:543 or 545 and encoding a protein set forth in SEQ ID NO:544 or 546; luciferase set forth in SEQ ID NO:547; or mKate set forth in SEQ ID NO:549.

[0323] c. Adjunct Therapy Proteins

[0324] Provided herein are oncovector constructs containing additional transcription units. These units can contain a gene or plurality of genes which encode proteins that can serve as adjunct therapeutic factors. These additional transcription units can be under the control of a conditional promoter that is the same as or is different from the conditional promoter driving expression of the other elements provided herein. These additional transcription units also can be an independent transcriptional unit within the construct or can be part of a bi-, tri- or poly-cistronic transcription/translation unit. Generally these additional transcription units contain genes which encode proteins that promote the selective destruction of a target cell population which is the same population of cells targeted by the oncovector constructs. Exemplary elements of the additional transcription units include, but are not limited to, suicide genes such as prodrug modifying elements, cytotoxic protein, and apoptosis-inducing proteins; cytokines; chemokines; and angiogenesis inhibitors. These elements can be modified to remove or reduce CpG motifs and/or to optimize for human codon usage, as described herein.

[0325] For example, anticancer genes have been expressed from viral vectors and include prodrug-activating or “suicide” genes, cytokine genes (to enhance immune defense against the tumor), tumor toxic genes such as diphtheria toxin, anti-angiogenesis genes, tumor vaccination genes, tumor suppressor genes, radiosensitivity genes, antisense RNA and ribozymes (see e.g., U.S. Pat. No. 6,897,067). Hence, the nucleic acid molecule also can contain one or more gene, such as an anticancer transgene, including, but not limited to, a suicide gene, a prodrug, cytokine genes, for example to enhance immune defense against the tumor (Blankenstein, T et al. J. Exp. Med. 173:1047-1052 (1991); Colombo, M. P., et al., Cancer Metastasis Rev. 16:421-432 (1997); Colombo, M. P., et al., Immunol. Today 15:48-51 (1994)), tumor toxic genes, such as diphtheria toxin (Coll-Fresno, P. M., et al., Oncogene 14:243-247 (1997)), pseudomonas toxin, anti-angiogenesis genes, radiosensitivity genes, antisense RNA and ribozymes (Zaia, J. A., et al., Ann. N.Y. Acad. Sci. 660:95-106 (1992)).

[0326] i. Suicide Gene

[0327] Any oncovector construct provided herein also can contain one or more suicide genes. Such suicide genes, when expressed, encode a protein that causes cell death. Suicide genes include, but are not limited to a gene encoding a protein that induces apoptosis, a toxin, a prodrug modifying gene, or a gene encoding a polypeptide that interferes with a signal transduction cascade involved with cellular survival or proliferation. Any one or more of these genes can be contained in the oncovector constructs provided herein.

[0328] a) Cytotoxic Proteins

[0329] Provided herein are oncovector constructs containing genes encoding cytotoxic proteins. Such genes encode proteins that kill cells directly and include bacterial toxin genes, which are normally found in the genome of certain bacteria and encode polypeptides (i.e. bacterial toxins) that are toxic to eukaryotic cells. Bacterial toxins include but are not limited to diphtheria toxin.

[0330] b) Apoptosis-Inducing Proteins

[0331] Provided herein are oncovector constructs containing genes encoding apoptosis-inducing proteins, which can cause cell death directly, for example, by inducing apoptosis. Such a gene is referred to as an “apoptosis-inducing gene”, and includes, but is not limited to TNF-α. Some apoptosis-inducing proteins, such as cysteine proteases, play a key role in the initiation, regulation, and execution of cell death through their proteolytic activities. Such exemplary apoptosis-inducing proteins include, but are not limited to, vesicular stomatitis virus M, cysteine proteases, caspases and calpains.

[0332] c) Proteins that Interfere with Cellular Survival and Proliferation

[0333] Additionally, a suicide gene can encode a polypeptide that interferes with a signal transduction cascade involved with cellular survival or proliferation. Such cascades include, but are not limited to, the cascades mediated by the Flt1 and Flk1 receptor tyrosine kinases). Polypeptides that can interfere with Flt1 and/or Flk1 signal transduction include, but are not limited to, a soluble Flt1 receptor (s-Flt1) and an extracellular domain of the Elk-1 receptor (ex-Flk1).

[0334] ii. Immunomodulatory Proteins

[0335] Any oncovector construct provided herein can contain any one or more genes encoding immunomodulatory proteins. Exemplary of such proteins are cytokine and/or chemokine proteins. Cytokines and/or chemokines can be included in the oncovector constructs provided herein for their ability to potentiate the induction of a secondary immune response against the cells expressing these proteins. Exemplary cytokines include, for example, interferon, interleukins and tumor necrosis factor cytokines. Such cytokines include, but are not limited to, interleukin 1, interleukin 2 (see, e.g., U.S. Pat. No. 4,738,927 or 5,641,665); interleukin 4, interleukin 5, interleukin 7 (see e.g., U.S. Pat. No. 4,965,195 or 5,328,988); interleukin 12 (see e.g., U.S. Pat. No. 5,457,038); interleukin 18, tumor necrosis factor alpha (see e.g., U.S. Pat. No. 4,677,063 or 5,773,58); interferon gamma (see e.g., U.S. Pat. No. 4,727,138 or 4,762,79); interferon alpha, or GM-CSF (see e.g., U.S. Pat. No. 5,393,870 or 5,391,485). Exemplary chemokines include, but are not limited to, macrophage inflammatory proteins, including MIP-3, (See, Well, T. N. and Peitsch, M C. J. Leukoc. Biol vol 61 (5): pages 545-50, 1997) and MCP-3. Other immunomodulatory proteins include proteins that stimulate interactions with immune cells (B7, CD28, MHC class I, MHC class II, TAPs).

[0336] iii. Angiogenesis Inhibitors

[0337] The oncovector constructs provided herein can contain genes encoding angiogenesis inhibitors. Exemplary angiogenesis inhibitors include, but are not limited to, anti-angiogenic proteins including, but not limited to, METH-1, METH-2, TrpRS fragments, proliferin-related protein, prolactin fragment, PEDF, vasostatin, various fragments of extracellular matrix proteins and growth factor/cytokine inhibitors. Various fragments of extracellular matrix proteins include, but are not limited to, angiostatin, endostatin, kininostatin, fibrinogen-E fragment, thrombospondin, tumstatin, canstatin, and restin.

[0338] 5. Modification of Components

[0339] The genes and non-coding regions of the oncovector constructs provided herein can be modified to be optimized for human usage and/or to be optimized for therapeutic use. For example, one of the problems with many therapeutic vaccines in humans is their stimulation of a host immune response against them (Ma X et al. (2002) Vaccine, 20:3263-71.) Thus, the constructs, or components of the constructs, provided herein can be optimized by modification to modulate the immunostimulatory response to the construct's composition.

[0340] It is known that different forms of nucleic acids can be potent inducers of immune responses, particularly foreign nucleic acid (Wattrang et al. (2005) Vet. Immunol. Immunopath., 107:265-279). The innate immune defense has evolved mechanisms to protect against invading microorganisms through the recognition of foreign patterns, such as carbohydrates and certain types of nucleotide sequences prevalent in microbial genomes. Among such sequences are unmethylated CpG motifs present in DNA, which are principally recognized by toll receptor 9 (TLR9), leading to the induction of inflammatory responses and the secretion of various cytokines that can be immunostimulatory (Raz et al. (1996) Proc. Natl. Acad. Sci. USA, 93:5141-5; Sato Y et al. (1996) Science, 273:352-4; Wattrang et al. (2005) Vet. Immunol. Immunopath., 107:265-279; Ma X et al. (2002) Vaccine, 20:3263-71; Stacey K J et al. (2003) J Immunol., 170:3614-20). Thus, the binding of TLR9 by bacterial or viral DNA, which is predominantly unmethylated as compared to mammalian DNA, results in the activation of proinflammatory cytokine production. The production of pro-inflammatory cytokines has a negative affect on gene expression. This may occur by activation of innate immune responses that disrupt normal cellular pathway, and can induce the methylation of exogenous DNA, which decreases transcription factor binding, to reduce gene expression. The production of pro-inflammatory cytokines also can potentiate the induction of a secondary immune response.

[0341] Particular DNA sequences containing the CG dinucleotide (CpG), often referred to as CpG motifs are recognized by pattern recognition receptors of the TLR9 family of innate immune response receptors. The optimal human motif contains a TCG sequence having the core sequence GTCGTT (SEQ ID NO:515; (Bauer V et al. (2001) Proc. Natl. Acad. Sci. USA, 98:9237-9242). The optimal mouse motifs contain the core sequences AACGTT (SEQ ID NO:516), GACGTT (SEQ ID NO:517), or AACGTC (SEQ ID NO:518), and also can induce some proinflammatory immune responses from human cells.

[0342] Any of the constructs provided herein, or components of the constructs provided herein, can be modified to remove or alter the CpG motifs. Such modification is known to one of skill in the art (see e.g., published U.S. Patent Appln. No. US 2004/0053870). In one example, CpG motifs of the construct, or any one or more components of the constructs, provided herein can be methylated to reduce the immunostimulatory response. Methylation of CpG motifs suppresses inflammation. In another example, the CpG motifs of the construct, or any one or more components of the construct, can be removed or altered to reduce the inflammatory response. In one embodiment, removal can be achieved by deleting or altering non-essential regions of a construct. In another embodiment, nucleic acid molecules encoding CpG motifs can be mutated, such as by site-directed mutagenesis, by altering the coding sequence of the nucleic acid molecule to remove the CpG motif. In such an embodiment, it is desired that the mutations are silent mutations such that the encoded amino acid sequence remains unchanged. For the use within human cells, the removal of the TCG motif is desired.

[0343] Thus, the entire construct provided herein can be re-designed to reduce the amount of CpG motifs available for the stimulation of TLR9 receptors. Any one or more components of the construct can be modified to remove or alter the CpG motifs including, but not limited to, the origin, the promoter, the replication initiator (e.g. SV-T), the antibiotic resistance, which aids in the selection and growth of the construct in E. Coli bacteria, the IRES, and others including any expressed genes. CpG modification is exemplified in Example 1.

[0344] Modification of the CpG motifs in the constructs, or any one or more components of the constructs, provided herein results in decreased inflammatory responses induced by the construct. Upon modification, the constructs can be tested to determine if they exhibit reduced immunostimulatory responses. Such assays are known to one of skill in the art, and include in vitro and in vivo assays. For example, any of the modified constructs, or any one or more components of the constructs, can be tested to determine if they exhibit a decreased induction of inflammatory cytokines compared to the unmodified construct. Induction of inflammatory cytokines can be tested in vitro using cell lines such as, but not limited to, THP-1 cells, RAW264.7, and J774A1 (Yasuda et al. (2004) Immunology, 111:282-290) or TLR9 transfected cells, or using primary cells such as macrophages, neutrophils or dendritic cells. Induction of inflammatory cytokines also can be tested following in vivo administration, such as from blood, serum or bronchoalveolar lavage fluid (see e.g., US 2004/0053870), depending on the route of administration. As discussed below, it is desired that any construct modified to remove CpG motifs will retain activity, such as for example, replication and fusogenic activities.

[0345] Besides modification of immunostimulatory elements, such as CpG motifs, the constructs, or components of the constructs provided herein, can be modified by optimization of the codons for expression in humans. Codon optimization involves balancing the percentages of codons selected with the published abundance of human transfer RNAs so that none is overloaded or limiting. This is necessary because most amino acids are encoded by more than one codon, and codon usage varies from organism to organism. Differences in codon usage between transfected genes and host cells can have effects on protein expression and immunogenicity of a vaccine construct. Table 8 below sets forth the Human codon usage frequency table. Thus, codons are chosen to select for those codons that are in balance with human usage frequency. The redundancy of the codons for amino acids is such that different codons code for one amino acid as depicted in Table 9 below. In selecting a codon for replacement, it is desired that the resulting mutation is a silent mutation such that the codon change does not affect the amino acid sequence. Generally, the last nucleotide of the codon can remain unchanged without affecting the amino acid sequence.

TABLE 8
Human Codon Usage Frequency

| | | | | | | | | | | | |
|---|---|---|---|---|---|---|---|---|---|---|---|
| TTT | 17.5 | (676381) | TCT | 15.1 | (585967) | TAT | 12.1 | (470083) | TGT | 10.5 | (407020) |
| TTC | 20.4 | (789374) | TCC | 17.7 | (684663) | TAC | 15.3 | (592163) | TGC | 12.6 | (487907) |
| TTA | 7.6 | (294684) | TCA | 12.2 | (471469) | TAA | 1.0 | ( 38222) | TGA | 1.5 | (59528) |
| TTG | 12.9 | (498920) | TCG | 4.4 | (171428) | TAG | 0.8 | ( 30104) | TGG | 13.2 | (510256) |
| CTT | 13.1 | (508151) | CCT | 17.5 | (676401) | CAT | 10.8 | (419726) | CGT | 4.6 | (176691) |
| CTC | 19.6 | (759527) | CCC | 19.8 | (767793) | CAC | 15.1 | (583620) | CGC | 10.5 | (405748) |
| CTA | 7.2 | (276799) | CCA | 16.9 | (653281) | CAA | 12.2 | (473648) | CGA | 6.2 | (239573) |
| CTG | 39.8 | (1539118) | CCG | 6.9 | (268884) | CAG | 34.2 | (1323614) | CGG | 11.5 | (443753) |
| ATT | 15.9 | (615699) | ACT | 13.1 | (506277) | AAT | 16.9 | (653566) | AGT | 12.1 | (469641) |
| ATC | 20.9 | (808306) | ACC | 18.9 | (732313) | AAC | 19.1 | (739007) | AGC | 19.5 | (753597) |
| ATA | 7.4 | (288118) | ACA | 15.0 | (580580) | AAA | 24.3 | (940312) | AGA | 12.1 | (466435) |
| ATG | 22.1 | (853648) | ACG | 6.1 | (234532) | AAG | 31.9 | (1236148) | AGG | 11.9 | (461676) |
| GTT | 11.0 | (426252) | GCT | 18.5 | (715079) | GAT | 21.8 | (842504) | GGT | 10.8 | (416131) |
| GTC | 14.5 | (562086) | GCC | 27.9 | (1079491) | GAC | 25.2 | (973377) | GGC | 22.3 | (862557) |
| GTA | 7.1 | (273515) | GCA | 15.9 | (614754) | GAA | 28.8 | (1116000) | GGA | 16.5 | (637120) |
| GTG | 28.2 | (1091853) | GCG | 7.4 | (286975) | GAG | 39.6 | (1532589) | GGG | 16.4 | (636457) |

TABLE 9
Codon Redundancy

| Amino Acid | Codon(s) |
|---|---|
| Aspartic Acid (Asp) | GAC; GAT |
| Lysine (Lys) | AAA; AAG |
| Valine (Val) | GTG; GTA; GTC; GTT |
| Leucine (Leu) | CTA; CTT; CTC; CTG; |
| | TTA; TTG |
| Asparagine (Asn) | AAC; AAT |
| Arginine (Arg) | CGA; CGT; CGC; CGG; |
| | AGA; AGG |
| Glutamic Acid (Glu) | GAA; GAG |
| Serine (Ser) | TCA; TCT; TCC; TTG; |
| | AGC; AGT |

[0346] For example, the codons TCT, TCC, TCA, TCG, AGT and AGT all code for Serine (note that T is the DNA equivalent to the U in RNA). From a human codon usage frequency as set forth in Table 8 above, the corresponding usage frequencies for these codons are 15.1, 17.7, 12.2, 4.4, 12.1, and 19.5, respectively. Since TCG corresponds to 4.4%, if this codon were commonly used in a gene synthesis, the tRNA for this codon would be limiting. In codon optimization, the goal is to balance the usage of each codon with the normal frequency of usage in the species of animal that you are optimizing for.

[0347] Generally, the strategy for optimizing a construct provided herein, or a component of a construct provided herein, is to optimize both human codon usage and also to optimize the immunostimulatory effect of the construct, such as by modifying CpG motifs. To do so requires consideration of several factors. First, any codon that contains a CpG motif is not used in optimization of the construct. For example, many Arginine codons contain CpG motifs and are not used at all. The remaining two Arginine codons then are balanced so that each is used approximately equally. This is exemplified with optimization of SV-T as described in Example 1. For example, the remaining two codons for Arginine were balanced in the SV-T gene at 48% and 51% each (AGA, AGG, respectively, shown in Table 15 in the usage Table). Second, in the sequence of a gene or non-coding region in a construct, any two codons placed next to one another could form a CpG motif. Thus, in assessing such sequences, it is desired that the choice of codon is made to avoid any formation of a CpG motif, even with an adjacent codon. Third, each of the above two requirements are primary considerations when selecting codons for human optimization. Thus, any codon that is selected to balance the codons based on human usage frequency must be made such that the replacing codons do not introduce codons containing CpG motifs, nor introduce CpG motifs with adjacent codons.

[0348] The final consideration in modifying a construct, or a component of a construct, provided herein, is to assess the modified sequences for introduced restriction sites. New restriction sites can be generated during the modification process. In one example, the newly modified sequence can be checked with a sequence analysis program in order to find newly generated restriction sites. If a restriction site has been introduced, silent mutations (nucleotide changes that do not change the amino acid sequence) can be introduced into the sequence to disrupt the unwanted restriction sites. Exemplary of such a sequence program is the DNA analysis program Gene Construction Kit® (Textco). This program can be used to design sequences, analyze CpG motifs, and to analyze restriction sites.

[0349] It is expected that modification of the constructs, or components of the constructs, to remove CpG motifs will often result in a shift in the codon usage frequency of the sequence. The objective for human optimization is then to attempt to balance the abundance of the codons while still adhering to the factors discussed above, in particular the first and second factors regarding removal of any CpG motifs. Because of the difficulty in following all of the above considerations simultaneously, the codon usage frequency is not always proportional to the human codon usage table. It is an objective, however, to get the codons as closely associated and balanced as possible.

[0350] Any one or more of a coding and/or non-coding region of a construct can be optimized as described herein, for example, to remove immunostimulatory elements, such as CpG motifs or to optimize for human usage. Exemplary of such coding and non-coding regions include, but are not limited to, coding genes such as the replication initiator, fusogenic component, or other genes encoding cytokines, chemokines, prodrugs, suicide genes and others, promoter, origin of replication, regulatory genes including the IRES, marker or selective genes such as genes encoding GFP or antibiotic resistance genes, and others.

[0351] Generally, if the region is truly a non-functional domain, the CpG can be removed and/or the sequence can be human optimized. Where the sequence is coding, or even for many non-coding sequences, it is necessary to rationally design and empirically test modifications to ensure that the resulting components or constructs function as contemplated. Such design and testing is within the skill of one in the art using assays as described herein and other assays known in the art. For example, despite the sequence being non-coding, many non-coding sequences are necessary for regulatory purposes, such as, but not limited to, replication, transactivation, stability of transcripts and others. Thus, it is necessary to ensure that modification of the CpG motif does not inhibit such functions of the non-coding regions. In one example, the SV40 origin set forth in SEQ ID NO:113 contains four closely spaced GAGGC (SEQ ID NO:122) motifs, two in one direction, and two inverted, that are necessary for binding of SV40 TAg. The SV40 recognition sequence for SV40 TAg is set forth in SEQ ID NO:123. This recognition sequence is the core binding domain for SV40 TAg and changing any nucleotides can negate all replicative activities associated with the SV40 TAg. It can be possible, however, to change the intervening nucleotides in order to reduce the CpG. For example, amino acid residues in the SV40 origin can be modified from GAGGCGGAGGCCGCCTCGGCCTC (SEQ ID NO:123) to GAGGCTGAGGCTGCCTCTGCCTC (SEQ ID NO:124 where the N's are T). The recognition motifs are underlined. The CG in SEQ ID NO:123 are in bold and the nucleotides proposed for modification in SEQ ID NO:124 are in italics. Thus, in this example, a modified origin can be tested for function in an assay to assess replication.

[0352] Typically, the constructs provided herein, or components of the constructs, including coding and non-coding regions, retain function or activity of the wild-type construct or component. The retained function or activity is about or is at least or about at least 30%, 40%, 50%, 60%, 70%, 80%, 90%, 95% or more of the function or activity of the wild-type construct or sequence not containing any modifications. For example, as discussed above, a modified and optimized origin of replication contained within a construct retains replicative activity. In another example, a modified and optimized replication initiator, such as for example, SV40 TAg also retains replicative ability. Where the SV40 TAg also is modified to uncouple transformation from replication, the SV40 TAg retains only replicative activity, but is deficient in its transformative activity. In an additional example, a modified and optimized E2F-1 promoter retains ability to induce gene transcription in a tumor-specific manner. One of skill in the art knows or can determine the function of the particular component or construct, and can empirically test such components following modification and optimization to identify those that retain function or activity. Generally, any construct provided herein containing modified and optimized non-coding and coding elements will retain replication and fusogenic activities. Where the construct is modified to remove CpG motifs it also will exhibit reduced immunostimulatory activity.

[0353] 6. Exemplary Oncovector Constructs

[0354] In one example, provided herein is an autonomous replicating nucleic acid molecule where the components are positioned on the nucleic acid in a consecutive order to include: A) a first promoter that controls expression of the genes; B) a first ORF coding for a reporter gene; C) an IRES separating the genes of interest; D) a second ORF coding for a replication initiator or variant thereof; and E) an origin of replication. The first and second ORF can be in reverse order. Hence, also provided herein is a nucleic acid molecule where the components are positioned on the nucleic acid in a consecutive order to include: A) a first promoter that controls expression of the genes; B) a first ORF coding for a replication initiator or variant thereof; C) an IRES separating the genes of interest; D) a second ORF coding for a reporter gene; and E) an origin of replication. The reporter genes can encode any reporter gene that encodes a detectable protein or a protein capable of being detected. Exemplary reporter genes are described above, and include for example, RFP, GFP, mKate2, luciferase, or beta-galactosidase. The replication initiator can be any that is compatible with the origin of replication in order to induce autonomous replicative activity of the construct. Exemplary origin/replication initiatior combinations are described herein, and include, but are not limited to, an SV40 origin and an SV40 T antigen; a BKV origin and BKV large T antigen; a BKV origin and SV40 T antigen; and an EBV origin and Epstein Barr virus Nuclear Antigen (EBNA), or mutants or variants thereof. The promoter can be a constitutive promoter or a cell-type of tumor-specific promoter. For example, the promoter can be a CMV promoter. In another example, a promoter is a tumor-specific promoter, such as but not limited to, EF1 or EF2 or a variant thereof. Exemplary of such constructs are set forth in Table 10 and 10A:

TABLE 10

| | | | | | | | SEQ |
|---|---|---|---|---|---|---|---|
| Construct | | | | | polyA | SV40 | ID |
| name (s) | Promoter | 1^{st} gene | IRES | 2^{nd} gene | signal | ori^{a} | NO. |
| pCzGFP-I- | CMV | zGFP | + | TAg (E107L) | SV40 | o | 706 |
| T(E107L) | | | | | | | |
| pCzGFP-I- | CMV | zGFP | + | TAg | SV40 | o | 707 |
| T(E107L/D402R) | | | | (E107L/D402R) | | | |
| pCzGFP-I- | CMV | zGFP | + | TAg | SV40 | o | 708 |
| T(E107L/E108L) | | | | (E107L/E108L) | | | |
| pCzGFP-I- | CMV | zGFP | + | TAg | SV40 | o | 709 |
| T(E107L/E108L/ | | | | (E107L/E108L/ | | | |
| D402R) | | | | D402R) | | | |
| pCzGFP-I- | CMV | zGFP | + | TAg | SV40 | o | 710 |
| T(E107L/E108L/ | | | | (E107L/E108L/ | | | |
| D453S) | | | | D453S) | | | |
| pCzGFP-I- | CMV | zGFP | + | TAg | SV40 | o | 711 |
| T(E107L/E108L/ | | | | (E107L/E108L/ | | | |
| V585R) | | | | V585R) | | | |
| pCzGFP-I- | CMV | zGFP | + | TAg | SV40 | o | 712 |
| T(E107L/E108L/ | | | | (E107L/E108L/ | | | |
| D604R) | | | | D604R) | | | |
| pCMV-GFP-IRES- | CMV | zGFP | + | TAg | syn | + | 607 |
| LTAg-WT BB3 | | | | | | | |
| (pCzGFP-I-T-BB3) | | | | | | | |
| (pCzGFP-I-T(WT)- | | | | | | | |
| BB3) | | | | | | | |
| pCzGFP-I-nT-BB3 | CMV | zGFP | + | native TAg^{b} | syn | + | 609 |
| pC-mKate2-I-T- | CMV | mKate2 | + | TAg | syn | + | 611 |
| BB3 | | | | | | | |
| pC-Luc-I-T-BB3 | CMV | Luciferase | + | TAg | syn | + | 612 |
| pC-Bgal-I-T-BB3 | CMV | Beta- | + | TAg | syn | + | 614 |
| | | galactosidase | | | | | |
| pCzGFP-I- | CMV | zGFP | + | TAg (L19F) | syn | + | 616 |
| T(L19F)-BB3 | | | | | | | |
| pCzGFP-I- | CMV | zGFP | + | TAg (P28S) | syn | + | 617 |
| T(P28S)-BB3 | | | | | | | |
| pCzGFP-I- | CMV | zGFP | + | TAg (L103P) | syn | + | 618 |
| T(L103P)-BB3 | | | | | | | |
| pCzGFP-I- | CMV | zGFP | + | TAg (C105A) | syn | + | 619 |
| T(C105A)-BB3 | | | | | | | |
| pCzGFP-I- | CMV | zGFP | + | TAg (E107L) | syn | + | 620 |
| T(E107L)-BB3 | | | | | | | |
| pCzGFP-I- | CMV | zGFP | + | TAg (E107K) | syn | + | 621 |
| T(E107K)-BB3 | | | | | | | |
| pCzGFP-I- | CMV | zGFP | + | TAg (E108L) | syn | + | 622 |
| T(E108L)-BB3 | | | | | | | |
| pCzGFP-I- | CMV | zGFP | + | TAg (S112N) | syn | + | 623 |
| T(S112N)-BB3 | | | | | | | |
| pCzGFP-I- | CMV | zGFP | + | TAg (S189N) | syn | + | 624 |
| T(S189N)-BB3 | | | | | | | |
| pCzGFP-I- | CMV | zGFP | + | TAg (D402R) | syn | + | 625 |
| T(D402R)-BB3 | | | | | | | |
| pCzGFP-I- | CMV | zGFP | + | TAg (P453S) | syn | + | 626 |
| T(P453S)-BB3 | | | | | | | |
| pCzGFP-I- | CMV | zGFP | + | TAg (V585R) | syn | + | 627 |
| T(V585R)-BB3 | | | | | | | |
| pCzGFP-I- | CMV | zGFP | + | TAg (D604R) | syn | + | 628 |
| T(D604R)-BB3 | | | | | | | |
| pCzGFP-I- | CMV | zGFP | + | TAg | syn | + | 629 |
| T(L103P/C105A)- | | | | (L103P/C105A) | | | |
| BB3 | | | | | | | |
| pCzGFP-I- | CMV | zGFP | + | TAg | syn | + | 630 |
| T(L103P/E107L)- | | | | (L103P/E107L) | | | |
| BB3 | | | | | | | |
| pCzGFP-I- | CMV | zGFP | + | TAg | syn | + | 631 |
| T(L103P/E108L)- | | | | (L103P/E108L) | | | |
| BB3 | | | | | | | |
| pCzGFP-I- | CMV | zGFP | + | TAg | syn | + | 632 |
| T(C105A/E107L)- | | | | (C105A/E107L) | | | |
| BB3 | | | | | | | |
| pCzGFP-I- | CMV | zGFP | + | TAg | syn | + | 633 |
| T(C105A/E108L)- | | | | (C105A/E108L) | | | |
| BB3 | | | | | | | |
| pCzGFP-I- | CMV | zGFP | + | TAg | syn | + | 634 |
| T(E107L/E108L)- | | | | (E107L/E108L) | | | |
| BB3 | | | | | | | |
| pCzGFP-I- | CMV | zGFP | + | TAg | syn | + | 635 |
| T(C105A/E107L/ | | | | (C105A/E107L/ | | | |
| E108L)-BB3 | | | | E108L) | | | |
| pCzGFP-I- | CMV | zGFP | + | TAg | syn | + | 636 |
| T(L103P/E107L/ | | | | (L103P/E107L/ | | | |
| E108L)-BB3 | | | | E108L) | | | |
| pCzGFP-I- | CMV | zGFP | + | TAg | syn | + | 637 |
| T(L103P/C105A/ | | | | (L103P/CA105A/ | | | |
| E107L/E108L)- | | | | E107L/E108L) | | | |
| BB3 | | | | | | | |
| pCzG-I- | CMV | zGFP | + | TAg | syn | + | 638 |
| T(E107L/E108L/ | | | | (E107L/E108L/ | | | |
| S112N)-BB3 | | | | S112N) | | | |
| pCzG-I- | CMV | zGFP | + | TAg | syn | + | 639 |
| T(C105A/E107L/ | | | | (C105A/E107L/ | | | |
| E108L/S112N)- | | | | E108L/S112N) | | | |
| BB3 | | | | | | | |
| pCzG-I- | CMV | zGFP | + | TAg | syn | + | 640 |
| T(C105A/E108L/ | | | | (C105A/E108L/ | | | |
| S112N)-BB3 | | | | S112N) | | | |
| pCzG-I- | CMV | zGFP | + | TAg | syn | + | 641 |
| T(C105A/E107L/ | | | | (C105A/E107L/ | | | |
| S112N)-BB3 | | | | S112N) | | | |
| pCzG-I- | CMV | zGFP | + | TAg | syn | + | 642 |
| T(C105A/S112N)- | | | | (C105A/S112N) | | | |
| BB3 | | | | | | | |
| pCzG-I- | CMV | zGFP | + | TAg | syn | + | 643 |
| T(L103P/E107K) | | | | (L103P/E107K) | | | |
| pCzG-I- | CMV | zGFP | + | TAg | syn | + | 644 |
| T(L105A/E107K) | | | | (L105A/E107K) | | | |
| pCzGFP-I- | CMV | zGFP | + | TAg | syn | + | 645 |
| T(Δ366-370)- | | | | (Δ366-370) | | | |
| BB3 | | | | | | | |
| pCzGFP-I- | CMV | zGFP | + | TAg | syn | + | 646 |
| T (Δ434-444)- | | | | (Δ434-444) | | | |
| BB3 | | | | | | | |
| pCMV/EF1-zGFP- | CMV | zGFP | + | TAg | syn | + | 666 |
| I-T-BB3 | enhancers/ | | | | | | |
| | EF1 | | | | | | |
| | promoter | | | | | | |
| pCMV/EF2-zGFP- | CMV | zGFP | + | TAg | syn | + | 667 |
| I-T-BB3 | enhancers/ | | | | | | |
| | EF2 tata- | | | | | | |
| | less | | | | | | |
| | promoter | | | | | | |
| pCMV/EF2 (ss)- | CMV | zGFP | + | TAg | syn | + | 668 |
| zGFP-I-T-BB3 | enhancers/ | | | | | | |
| | EF2 tata- | | | | | | |
| | less | | | | | | |
| | promoter | | | | | | |
| | (redundant | | | | | | |
| | BamHI | | | | | | |
| | site | | | | | | |
| | removed) | | | | | | |
| pCMV/EF2-zGFP- | CMV | zGFP | + | TAg | syn | + | 669 |
| I-T (L103P)-BB3 | enhancers/ | | | (L103P) | | | |
| | EF2 tata- | | | | | | |
| | less | | | | | | |
| | promoter | | | | | | |
| pCMV/EF2-zGFP- | CMV | zGFP | + | TAg | syn | + | 670 |
| I-T (C105A)-BB3 | enhancers/ | | | (C103A) | | | |
| | EF2 tata- | | | | | | |
| | less | | | | | | |
| | promoter | | | | | | |
| pCMV/EF2-zGFP- | CMV | zGFP | + | TAg | syn | + | 671 |
| I-T (E107K)-BB3 | enhancers/ | | | (E107K) | | | |
| | EF2 tata- | | | | | | |
| | less | | | | | | |
| | promoter | | | | | | |
| pCMV/EF2-zGFP- | CMV | zGFP | + | TAg | syn | + | 672 |
| I-T | enhancers/ | | | (L103P/C105A) | | | |
| (L103P/C105A)- | EF2 tata- | | | | | | |
| BB3 | less | | | | | | |
| | promoter | | | | | | |
| pCMV/EF2-zGFP- | CMV | zGFP | + | TAg | syn | + | 673 |
| I-T | enhancers/ | | | (L103P/E107K) | | | |
| (L103P/E107K)- | EF2 tata- | | | | | | |
| BB3 | less | | | | | | |
| | promoter | | | | | | |
| pCMV/EF2-zGFP- | CMV | zGFP | + | TAg | syn | + | 674 |
| I-T | enhancers/ | | | (C105A/E107K) | | | |
| (C105A/E107K)- | EF2 tata- | | | | | | |
| BB3 | less | | | | | | |
| | promoter | | | | | | |
| pCMV/EF1/E2F- | CMV | zGFP | + | TAg | syn | + | 675 |
| zGFP-I-T-BBS | enhancers/ | | | | | | |
| | EF1 and | | | | | | |
| | tata-less | | | | | | |
| | E2F | | | | | | |
| | promoter | | | | | | |
| pCMV/int-zGFP-I- | CMV plus | zGFP | + | TAg | syn | + | 676 |
| T-BB3 | pCI intron | | | | | | |
| pC-SEAP-I-T-BB3 | CMV | SEAP | + | TAg | syn | + | 677 |
| pE2F1-zGFP-I-T- | E2F-1 | zGFP | + | TAg | syn | + | |
| BB3 | | | | | | | |
| pC-T-I-zGFP-BB3 | CMV | TAg | + | zGFP | syn | + | 689 |
| pC-T-I-Luc-BB3 | CMV | TAg | + | Luciferase | syn | + | 691 |

^{a}SV40 ori o: original, unmodified SV40 ori from pIRES2-EGFP (contains CpG)
^{b}native TAg is the unmodified SV40-T Ag gene sequence (not modified to remove CpG or optimized for human codon frequency)

TABLE 10A

| | | | | | | | | SEQ |
|---|---|---|---|---|---|---|---|---|
| Construct | | | Internal | | Internal | | SV40 | ID |
| name | Promoter | 1^{st} gene | Promoter | IRES | Promoter | 2^{nd} gene | ori | NO. |
| pC-Luc-RSV- | CMV | Luciferase | Reos | + | — | TAg | + | 728 |
| I-T-BB3 | | | sarcoma | | | | | |
| | | | virus | | | | | |
| | | | (RSV) | | | | | |
| pCzG-1I-T-BB3 | CMV | zGFP | — | 1I^{a} | — | TAg | + | 729 |
| pCzG-1I-T-dSV | CMV | zGFP | — | 1I^{a} | — | TAg | − | 688 |

^{a}IRES mutant 1I: ATGG at 3′ end mutated to ATCC to remove potentially redundant ATG start site for gene in the 2^{nd} position

[0355] In another example, provided herein is an autonomous replicating nucleic acid molecule where the components are positioned on the nucleic acid in a consecutive order to include: A) a first promoter that controls expression of the genes; B) a first ORF coding for a fusogenic protein; C) an IRES separating the genes of interest; D) a second ORF coding for a replication initiator or a variant thereof; and E) an origin of replication. The first and second ORF can be in reverse order. Hence, also provided herein is a nucleic acid molecule where the components are positioned on the nucleic acid in a consecutive order to include: A) a first promoter that controls expression of the genes; B) a first ORF coding for a replication initiator or a variant thereof; C) an IRES separating the genes of interest; D) a second ORF coding for a fusogenic protein; and E) an origin of replication. The nucleic acid encoding a fusogenic protein can include any fusogenic protein described above or known in the art. Exemplary of such proteins are ARVp10, RRVp14, BRV p15, GALV, SV5F, VSVG or any variants thereof. The replication initiator can be any that is compatible with the origin of replication in order to induce autonomous replicative activity of the construct. Exemplary origin/replication initiatior combinations are described herein, and include, but are not limited to, an SV40 origin and an SV40 T antigen; a BKV origin and BKV large T antigen; a BKV origin and SV40 T antigen; and an EBV origin and Epstein Barr virus Nuclear Antigen (EBNA), or mutants or variants thereof. The promoter can be a constitutive promoter or a cell-type of tumor-specific promoter. For example, the promoter can be CMV. Exemplary of such constructs are set forth in Table 11 and Table 12:

TABLE 11

| | | | | | | | SEQ |
|---|---|---|---|---|---|---|---|
| Construct | | | | | polyA | SV40 | ID |
| name (s) | Promoter | 1st gene | IRES | 2nd gene | signal | oria | NO. |
| pCzARVp10- | CMV | zARVp10 | + | TAg | syn | + | 647 |
| I-T-BB3 | | | | | | | |
| pCzRRVp14- | CMV | zRRVp14 | + | TAg | syn | + | 649 |
| I-T-BB3 | | | | | | | |
| pCzBRVp15-I-T-BB3 | CMV | zBRVp15 | + | TAg | syn | + | 651 |
| pCzGALV-I-T-BB3 | CMV | GALV | + | TAg | syn | + | 653 |
| pCzSV5F-I-T-BB3 | CMV | SV5F | + | TAg | syn | + | 655 |
| pCzVSVG-I-T-BB3 | CMV | VSVG | + | TAg | syn | + | 657 |
| pCzSV5F-I- | CMV | SV5F | + | TAg | syn | + | 659 |
| T(G105A)-BB3 | | (G105A) | | | | | |
| pCzSV5F-I- | CMV | SV5F | + | TAg | syn | + | 660 |
| T(G109A)-BB3 | | (G109A) | | | | | |
| pCzSV5F-I- | CMV | SV5F | + | TAg | syn | + | 661 |
| T(G114A)-BB3 | | (G114A) | | | | | |
| pCzSV5F-I- | CMV | SV5F | + | TAg | syn | + | 662 |
| T(G105A/G109A)- | | (G105A/G109A) | | | | | |
| BB3 | | | | | | | |
| pCzSV5F-I- | CMV | SV5F | + | TAg | syn | + | 663 |
| T(G105A/G109A/ | | (G105A/G109A/ | | | | | |
| G114A)-BB3 | | G114A) | | | | | |
| pC-T-I-zGALV-BB3 | CMV | TAg | + | zGALV | syn | + | 693 |
| pCzSV5F-I-T | CMV | zSV5F | + | TAg | SV40 | o | 700 |
| pCzVSVG-I-T | CMV | zVSVG | + | TAg | SV40 | o | 701 |
| pCz ARVp10-I-T | CMV | zARVp10 | + | TAg | SV40 | o | 702 |
| pCz RRVp14-I-T | CMV | zRRVp14 | + | TAg | SV40 | o | 703 |
| pCz BRVp15-I-T | CMV | zBRVp15 | + | TAg | SV40 | o | 704 |
| pCzGALV-I-T | CMV | zGALV | + | TAg | SV40 | o | 705 |
| pCzGALV-I-T-BB4 | CMV | zGALV | + | TAg | SV40 | + | 722 |

aSV40 ori o: original, unmodified SV40 ori from pIRES2-EGFP (contains CpG)

TABLE 12

| | | | | | | | | SEQ |
|---|---|---|---|---|---|---|---|---|
| Construct | | | Internal | | Internal | | SV40 | ID |
| name | Promoter | 1^{st} gene | Promoter | IRES | Promoter | 2^{nd} gene | ori | NO. |
| pC-T-I-RSV-GALV-BB3 | CMV | TAg | — | + | Reos | GALV | + | 727 |
| | | | | | sarcoma | | | |
| | | | | | virus | | | |
| | | | | | (RSV) | | | |

[0356] In a further example, provided herein is an autonomous replicating nucleic acid molecule where the components are positioned on the nucleic acid in a consecutive order to include: A) a first promoter that controls expression of the genes; B) a first ORF coding for a pro-drug modifying enzyme or variant thereof; C) an IRES separating the genes of interest; D) a second ORF coding for a replication initiator or a variant thereof; and E) an origin of replication. The first and second ORF can be in reverse order. Hence, also provided herein is a nucleic acid molecule where the components are position on the nucleic acid in a consecutive order to include: A) a first promoter that controls expression of the transgenes; B) a first ORF coding for a replication initiator or a variant thereof; C) an IRES separating the genes of interest; D) a second ORF coding for a pro-drug modifying enzyme; and E) an origin of replication. The nucleic acid encoding a prodrug-modifying enzyme can include any described above or known in the art. Exemplary of such proteins are HSV1-TK or CD or any variants thereof. The replication initiator can be any that is compatible with the origin of replication in order to induce autonomous replicative activity of the construct. Exemplary origin/replication initiatior combinations are described herein, and include, but are not limited to, an SV40 origin and an SV40 T antigen; a BKV origin and BKV large T antigen; a BKV origin and SV40 T antigen; and an EBV origin and Epstein Barr virus Nuclear Antigen (EBNA), or mutants or variants thereof. The promoter can be a constitutive promoter or a cell-type of tumor-specific promoter. For example, the promoter can be CMV. Exemplary of such constructs are set forth in Table 13:

TABLE 13

| | | | | | | | SEQ |
|---|---|---|---|---|---|---|---|
| Construct | | | | | polyA | SV40 | ID |
| name (s) | Promoter | 1st gene | IRES | 2nd gene | signal | oria | NO. |
| pC-zCDase-I-T-BB3 | CMV | zCDase | + | TAg | syn | + | 664 |
| pCzCDase-I-T-BB4 | CMV | zCDase | + | TAg | SV40 | + | 724 |

### D. METHODS OF DESIGNING ONCOVECTOR CONSTRUCTS

[0357] One of skill in the art can empirically design oncovector constructs, for example, by using any of the components described herein or other components known to one of skill in the art, and test them for replicative, oncotherapeutic, and bystander activities, such as by using assays described in Section E. The oncovector constructs can be designed from a series of intermediate or backbone constructs each containing one or more or all of the components of the construct, or modified forms thereof. Empirically designing and testing a series of intermediate constructs permits the individual assessment of each component of the construct on the replication, oncotherapeutic, and bystander activities of the construct and/or their interaction with other components in the construct. The final oncovector constructs can be integrated from the various intermediates.

[0358] Thus, in one example, each component can be designed into a separate construct and tested individually for the desired activity, and then the desired components can be integrated into a single construct. For example, the replication components (i.e. origin of replication and/or replication initiator), or modified forms thereof, can be incorporated into a single construct and tested for replication activity in any appropriate host cell, using for example, a reporter gene expressed from the construct as a readout of replication. Reporter gene expression also can be combined with quantitative PCR to determine plasmid replication. Such replication components also can be tested to ensure that they do not induce transformation, for example by confirming a lack of binding to tumor suppressor proteins such as Retinoblastoma (Rb) or p53 proteins. Likewise, the therapeutic gene, such as a bystander gene, or modified forms thereof, can be incorporated into a single construct under the control of a desired promoter and tested for oncotherapeutic (e.g., oncolytic, fusogenic, cytotoxic) and bystander activities of the gene within transfected host cells. In an additional example, the tissue or cell-specific promoter, or modified forms thereof, can be incorporated into a single construct and tested for induction of gene expression of a reporter gene operatively linked thereto in the appropriate cells, for example, tumor cells.

[0359] The experimental test constructs can be artificially synthesized as discussed below, and then tested. Once each individual component has been tested to identify those that exhibit the desired activity, the components can be combined into a single construct to integrate all activities. Those constructs that exhibit all desired activities are selected as oncovector constructs. Such a method permits a rational assessment of desired actives, which can occur in parallel, thereby providing an efficient means to test the activity of each individual component before integration.

[0360] A backbone vector also can be reconstructed and modified to facilitate the insertion and/or integration of all components into a common background containing fixed restriction sites. Thus, each of the components, or modified components, can be easily “swapped out” to permit the efficient manipulation of the components in the intermediate constructs. Each individual component can be recombinantly generated by standard molecular biology techniques to have the appropriate restriction sites. Also, as discussed below, each individual component can be artificially synthesized to contain the appropriate restriction sites. The artificially synthesized constructs, or the vector constructs, can be tested for activity in appropriate assays.

[0361] Alternatively, the oncovector constructs can be designed by creating all combinations of desired components into single constructs, and testing each construct individually to identify those that retain replication, anti-tumor activities and bystander effects. Thus, single constructs can be generated containing all possible permutations of each desired component, and each single construct can be tested to identify those constructs that exhibit a minimum of replication and fusogenic activities. The advantage of such a method is that it avoids any bias of any individual component, since all components of the constructs are integrated from the beginning.

[0362] Furthermore, multiple constructs can be designed and used such that combinations of desired components are incorporated, individually or in combination, into two or more backbone constructs, which are co-expressed and tested together to identify combinations of vectors that exhibit desired activities, including replication, oncotherapeutic, and bystander activities.

[0363] Exemplary methods to design and identify oncovector constructs involves a system of intermediate experimental constructs and backbone vectors such that the development of the final oncovector construct occurs in parts, which can be integrated later. Thus, in one example, a starting or initial backbone vector can be used to generate experimental intermediate test vectors to test replicative, oncotherapeutic, or bystander activities individually, or combinations thereof. The initial starting backbone vector also can be separately modified to optimize the plasmid backbone, thereby resulting in intermediate backbone vectors. Reconstruction of the plasmid backbone can be performed separately and/or in parallel to the construction of the experimental test vectors. Once optimized, the transcriptional unit can be removed from an experimental test vector and ligated into a designed backbone vector in order integrate the components into a single construct.

[0364] This is described with respect to the generation of a self-replicating construct containing an SV40 TAg, or mutant thereof, a cell cycle-dependent promoter (e.g., E2F), or mutant thereof, for accumulation of the construct specifically in tumor cells, and a therapeutic gene, or modified form thereof, such as one that encodes a bystander protein. One of skill in the art can adapt the method discussed below to design a construct containing other replication components, promoter elements such as cell-cycle dependent promoters, oncotherapeutic components and other desired components, such as genes for adjunct therapy, so long as the intermediate constructs exhibit the expected activity and the fully integrated final construct minimally contains replication, oncotherapeutic, and bystander activities.

[0365] 1. Backbone Constructs

[0366] Backbone constructs can be generated that contain various regulatory elements and other elements necessary for gene expression. The vectors can be modified or reconstructed to remove unwanted segments (e.g. f1 single stranded ori), to add unique restriction sites, to add other transcription units of interest, and/or to reduce CpG content. The backbone constructs can be used to introduce replicative, fusogenic and/or promoter elements in order to generate intermediate experimental oncovector constructs for testing of each component individually or in combination. Adjunct therapy genes also can be incorporated into backbone constructs to enhance therapeutic activity of the constructs. Once the replicative, fusogenic, promoter, and/or other elements are identified, they can be integrated together to generate a final construct. Genes or nucleotide sequences of interest can be generated de novo by synthetic construction (e.g. overlapping PCR and/or oligonucleotide hybridization) or desired sequences can be removed from already existing sources such as commercially available vectors. Synthesized or harvested sequences can be further modified by site directed mutagenesis, PCR, or other methods known to those of skill in the art. Such modifications include, but are not limited to modifying a sequence to reduce antigenicity (e.g. reduce CpG motifs), modification of a coding sequence to optimize human codon usage, modification of a coding sequence to reduce or enhance a desired activity, and addition of restriction sequences for cloning purposes. Insertion of a desired gene or other nucleotide sequence into a backbone vector also can involve subcloning into other intermediate vectors, such as pCR-2.1-topoTA (SEQ ID NO: 470) prior to integration into the backbone vector.

[0367] Exemplary of a backbone vector is pIRES2-EGFP (SEQ ID NO: 1). The pIRES2-EGFP contains a bacterial pUC origin of replication between restriction sites BspHI and AseI (SEQ ID NO: 118); a CMV eukaryotic promoter between restriction sites AseI and NheI (SEQ ID NO: 504); a multiple cloning site between restriction sites NheI and BamHI (SEQ ID NO: 112); an internal ribosome entry site (IRES) from Encephalomyocarditis virus (EMCV) (SEQ ID NO:104) between restriction sites BamHI and BstXI; an enhanced green fluorescent protein (EGFP) gene (SEQ ID NO:543, encoding a protein set forth in (SEQ ID NO: 544)) between restriction sites BstXI and NotI; an SV40 polyadenylation (pA) signal sequence (SEQ ID NO: 191); an f1 single-strand DNA origin (f1 ss ori; SEQ ID NO: 117); an SV40 early promoter and an SV40 origin of replication (SEQ ID NO: 113) between restriction sites NotI and StuI; a Kanamycin/Neomycin resistance gene (Kan/NeoR; SEQ ID NO:105, encoding a protein set forth in SEQ ID NO: 110); and an HSV thymidine kinase (TK) polyadenylation signal sequence (HSV-1TK-pA) between restriction sites StuI-BspHI (SEQ ID NO: 192). Features of the backbone vector pIRES2-EGFP are set forth in FIG. 2A.

[0368] The above backbone vector can be used as a starting vector for which backbone modifications can be made and incorporated. The objective in modifying the backbone is to remove unwanted segments (e.g., f1 ss ori); to introduce or relocate unique restriction sites to permit insertion and swapping of replicative, fusogenic, reporter, and/or other genes or sequences of interest; to add an adjunct therapy gene, such as a pro-drug modifying gene; and to reduce the CpG content of components of the backbone construct, such as of the pUC ori and the SV40 ori without destroying their functions. For example, the individual components can be modified to remove CpG motifs and, in cases where the modified component encodes a protein, to optimize for human codon usage. Components of the backbone construct also can be individually tested and optimized. Such experiments can be performed in parallel with the design and generation of the experimental vectors, including the self-replicative and fusogenic vectors, as described below. Desired modifications can be included in the final integrated vector.

[0369] Example 5 herein details the generation of exemplary further intermediate backbone vector constructs that were generated from pIRES2-EGFP. For example, Intermediate 1 (SEQ ID NO: 2) is a backbone vector derived from pIRES2-EGFP that removes the SV40 prom/ori, introduces new restriction sites, and replaces the Kan/NeoR transcription unit with a human codon-optimized and CpG-free Kan/NeoR transcription unit (SEQ ID NO: 106), including a synthetic cell cycle-dependent promoter (SEQ ID NO: 107), a CpG-free, human codon-optimized Kan/NeoR gene (SEQ ID NOS: 108 and 109, encoding a Kan/NeoR protein set forth in SEQ ID NO: 110), and CpG modified pA signal for the Kan/NeoR gene (SEQ ID NO: 193), between NotI and BspH1 restriction sites. New SexA1, PacI, Pf1FI, and Bg1II restriction sites are also integrated into Intermediate 1 (see FIG. 3A).

[0370] Intermediate 2 (SEQ ID NO: 3) is a backbone vector derived from Intermediate 1 wherein a fragment, containing a CpG modified synthetic polyadenylation sequence and a CpG-modified SV40 promoter/ori separated by a SexAI restriction site, is incorporated between the newly introduced NotI and SexAI restriction sites (see FIG. 3B). Various modifications of the SV40 promoter/ori sequence in Intermediate 2 backbone can be functionally tested and optimized for replication in mammalian cells known to express SV40 TAg, e.g.

[0371] Intermediate vector 3 (SEQ ID NO:4) is constructed from backbone Intermediate 2 wherein the pUC ori, CMV promoter, and multiple cloning site, between the Pf1FI and BamHI restriction sites, are replaced with a synthetic fragment containing a CpG-modified pUC, flanked by Bg1II and AseI restriction sites, and an NheI site all contained between Pf1FI and BamHI restriction sites (see e.g. FIG. 3C). Various modifications of the pUC ori sequence in Intermediate 3 backbone can be functionally tested and optimized for replication in bacteria.

[0372] Backbone constructs also can be constructed to contain adjunct therapy genes, in addition to the fusogenic gene. It is understood that any additional adjunct therapy gene can be included in a construct herein, including but not limited to expression of a suicide gene, a pro-drug modifying enzyme, a cytotoxic protein, an apoptosis-inducing protein, proteins that interfere with cellular survival or proliferation, an immunomodulatory protein or an angiogenesis inhibitor. Exemplary of an adjunct therapy gene is the pro-drug modifying gene HSV-TK. A backbone construct, designated intermediate 4 backbone construct, containing this adjunct therapy gene is exemplified in FIG. 3D, which contains an additional transcription unit for the HSV-TK gene flanked by Pf1FI and Bg1II restriction sites (SEQ ID NO: 5). Hence, any additional transcription unit can be inserted into a construct between the Pf1FI and Bg1II restriction sites using this intermediate vector. For example, further backbone or intermediate constructs can be generated containing a reporter gene or other gene in that position. This is exemplified for the backbone construct designated BB3, which is exemplified in FIG. 3G, and contains a further reporter gene (e.g. red fluorescent protein) flanked by Pf1FI and Bg1II restriction sites (SEQ ID NO: 607).

[0373] Example 5 sets forth the generation of exemplary backbone constructs including Intermediate 1, Intermediate 2, Intermediate 3 and Intermediate 4 (see e.g., FIG. 3A-3D). The intermediate 3 and 4 backbone constructs are set forth in SEQ ID NOS: 4 and 5, respectively. Each of the intermediate backbone constructs, such as intermediate 3 and intermediate 4 backbone constructs, can be modified further to remove components and/or optimize sequences as desired. This is exemplified for the generation of further intermediate constructs designated BB3 (see e.g. SEQ ID NO:607 and FIG. 3G) and BB4 (see e.g. SEQ ID NO:719 and FIG. 3I) and BB5 (SEQ ID NO:726 and FIG. 3K). Any of the intermediate vectors also can be used to generate non-replicating vectors lacking the SV40 core origin (see e.g. SEQ ID NO: 608 and 721 and FIGS. 3H and 3J). In other examples, the Intermediate 3 backbone construct and the Intermediate 4 backbone construct, or other backbone or intermediate constructs described herein or derived from any described herein, can be used as recipient vectors for testing pUC origins that can be modified to reduce CpG motifs. Newly synthesized versions of pUC oris or any other test oris can be inserted into the unique Bg1II-Ase1 restrictions sites. The functional assay to test for the function of the pUC ori is the ability of the plasmid construct to replicate in E. coli bacteria.

[0374] Any one or more of the components can be inserted to replace any one of the above components in any of the above backbone constructions. For example, the initial backbone construct can be used to generate experimental test vectors to assess the expression, replication and/or fusogenic activities of one or more components alone or in combination. The series of experimental and backbone intermediate constructs can be generated in parallel. For example, one experimental vector set can be generated to assess the replication components, including those components that permit self-replication, and in particular, to select for an SV-T mutant that can induce replication without inducing transformation. Another experimental vector set can be generated to assess various fusogenic or other oncolytic genes, and variants thereof, for fusogenic or cytotoxic activity and/or bystander effects.

[0375] 2. Experimental Test Vector Backbones

[0376] Experimental vectors can be generated whereby one or more components can be tested for replicative, fusogenic, oncolytic, cytotoxic, bystander, and/or other desired activity or activities. In order to test the replication and fusogenic activity of the above experimental intermediate vectors, a reporter gene can be used. Once activity is confirmed, the component parts can be integrated into one or more final vectors that exhibit replicative, fusogenic, oncolytic, cytotoxic, bystander, and/or other desired activity.

[0377] Exemplary of a reporter gene are any described in Section B above. For example, the reporter gene can be RFP or EGFP. For example, the EGFP already contained in the pIRES2-EGFP initial backbone vector above can be used. Alternatively, an EGFP gene can be synthesized, such as is described in Example 1, which is an EGFP gene that has been optimized for human codon usage, as well as removing CG dinucleotides (CpG motifs). The EGFP gene can be synthesized to contain flanking sequences which contain the BstXI restriction site sequence (CCANNNNNNTGG; SEQ ID NO: 554) and the NotI restriction site sequence (GCGGCCGC; SEQ ID NO: 556). The BstXI restriction site is an ambiguous one as the Ns in the site recognition formula can be any nucleotide (A, T, C, and G). For example, the Ns in the BstXI restriction site can be designed to be CAACCA, giving rise to the BstXI-recognized sequence CCACAACCATGG (SEQ ID NO: 605). This BstX1 sequence can be integrated as part of the coding sequence of the EGFP gene, where ACCATGG (corresponding to nucleotides 6-12 of the sequence set forth in SEQ ID NO: 605) becomes the Kozak sequence for efficient initiation of gene translation. The NotI restriction site does contain two CpG motifs. Although these are not optimum CpG motifs, they can be removed if desired from any final version of vectors by site directed mutagenesis. An exemplary sequence of a modified EGFP gene is set forth in SEQ ID NO: 545 and encoding a sequence of amino acids set forth in SEQ ID NO: 546.

[0378] The modified EGFP can be inserted into pIRES2-EGFP to replace the unmodified EGFP. For example, the pIRES2-EGFP vector can be digested with BstXI/NotI and the digested vector can be ligated together with the modified EGFP fragment using standard molecular biology techniques. Upon transformation and purification, the resultant vector can be sequenced. Exemplary primers for sequencing include a forward primer located within the IRES sequence having a sequence of 5′-GAGGTTAAAAAAACGTCTAGG-3′ (SEQ ID NO: 463; synthesized by Allele Biotechnology, San Diego, Calif.) and a reverse primer located within the SV40pA sequence having a sequence of 5′-TTTCAGGTTCAGGGGGAGGTG-3′ (SEQ ID NO:464; synthesized by Allele Biotechnology). Such an intermediate backbone vector is termed pIRES2-zGFP and a plasmid map and sequence are set forth in FIG. 2B and SEQ ID NO: 694, respectively. The backbone vector can be further modified by inserting genes to be tested as described below.

[0379] a. Replication Competent Vector

[0380] A first series of experimental intermediate vectors can be made to test the replication activity of a replication initiator protein. For example, a gene or a modified form of a gene for a replication initiator, including but not limited to the SV40 TAg, and other polyomaviruses, and Epstein-Barr virus nuclear antigen (EBNA) for Epstein-Barr virus (EBV) can be tested for replicative activity. In addition, a gene or modified form of a gene for a replication initiator also can be tested for transforming activity. Typically, as described in Section B, constructs herein are designed such that replicative and transforming activities are uncoupled so that the vector constructs are capable of replication but exhibit minimal to no transforming activities.

[0381] In one example, vectors containing the SV40 TAg gene or modified form thereof can be generated and tested for activity. For example, SV40 TAg gene sequence (SEQ ID NOS: 561; encoding the amino acid sequence set forth in SEQ ID NO: 564), or modified forms thereof such as any provided herein or known to one of skill in the art, can be inserted into the multiple cloning site of the pIRES2-zGFP vector, for example between the NheI and BamHI restriction sites. As discussed above, the SV40 TAg sequence can be optimized for human codon usage and/or can be modified to remove CpG motifs without (SEQ ID NOS: 562 or 563, both encoding the amino acid sequence set forth in SEQ ID NO: 564). In addition, other modifications, which result in modifications of the TAg protein, known in the art including any described herein (see e.g., any of SEQ ID NOS: 565-604), can be used. Thus, any SV40 TAg sequence including, but not limited to, SEQ ID NOS: 561-563 or nucleic acid sequences encoding proteins set forth in SEQ ID NOS: 564-604 can be inserted into the pIRES2-zEGFP vector or other backbone cassette. Any SV40 TAg gene sequence contemplated to be inserted can be artificially synthesized to contain flanking NheI (GCTAGC; SEQ ID NO: 555) and BamHI (GGATCC; SEQ ID NO: 551) restriction sites to permit cloning into the multiple cloning site in pIRES2-zGFP. The SV40 TAg sequence also can contain internal BstXI-NotI sites, so that it can be cut out of the vector and moved into the BstXI-NotI position in the final vector (i.e. replacing the EGFP sequence currently residing in the intermediate vector). Sequences of resulting experimental intermediate vectors can be confirmed using the forward primer sequence located in the CMV promoter having a sequence 5′-GTAGGCGTGTACGGTGGGAGG-3′ (SEQ ID NO: 462; Allele Biotechnology) and a reverse primer located in the IRES element having a sequence of 5′-CATATAGACAAACGCACACC-3′ (SEQ ID NO: 464; Allele Biotechnology). The features of the resulting vector are set forth in FIG. 2C. The resulting vector is designated pC-T-I-zGFP and has a sequence of nucleotides set forth in SEQ ID NO: 697.

[0382] Any of the vectors containing SV40 TAg or a modified form of SV40 TAg, including any derived from pC-T-I-zGFP, can be tested for replicative activity as described in Section E below. In addition, the vectors also can be tested for transforming activity to identify a mutant whose replicative and transforming activities are uncoupled. Such an analysis permits the identification of mutations of SV40 TAg that allow replication despite the mutations eliminating the binding to Rb, p53 or HSP70 protein (to minimize transforming activity). Initial tests can be performed using permissive (Rb−/− and/or p53−/−) tumor cells lines, with expression of the SV-T driven by the cytomegalovirus (CMV) promoter contained within these intermediate constructs. As discussed below, the plasmid copy number can be correlated to expression of a reporter gene, such as EGFP fluorescence. Plasmid copy number also can be determined by quantitative real-time polymerase chain reaction, also called qPCR. EGFP fluorescence can be determined by direct cell fluorescence, by average cellular fluorescence using flow cytometry, or by measuring the fluorescence of cell lysates. Control studies can be performed by placing an irrelevant gene, such as Dihydrofolate Reductase (DHFR), into a control vector in place of the SV40 TAg. The modified SV40 TAg capable of uncoupling replication and transformation also can be tested for replication abilities compared to the wild-type TAg. Candidate TAg mutations can be identified that retain autonomous vector replication but do not exhibit transforming activities.

[0383] b. Fusogenic Competent Vectors

[0384] The second series of experimental intermediate vectors can be made by inserting into the pIRES2-zGFP, or other experimental intermediate vector or backbone construct, a fusogenic gene. Fusogenic genes that can be tested include any set forth in Section B above. Viral fusogenic proteins include, but are not limited to, Simian Virus 5F (SV5F), Vesicular Stomatitis Virus G protein (VSVG), Gibbon Ape Leukemia Virus envelope protein (GALV), Avian Reovirus (ARV) p10, Reptilian Reovirus (RRV) p14, and Baboon Reovirus (BRV) p15, or modified forms thereof. To permit efficient insertion of the fusogenic gene into the pIRES2-zGFP vector or other backbone vector, the sequences can be synthesized to contain flanking restriction sites to allow insertion into any of the backbone vectors described herein. In examples herein, the sequences can be synthesized to contain flanking NheI and BamHI sites to allow insertion into the multiple cloning site of the vector.

[0385] For example, the SV5F can be introduced as the fusogenic gene. The wild type sequence of SV5F is set forth in SEQ ID NO: 18 and encodes a sequence of amino acids set forth in SEQ ID NO: 44. Nucleic acids encoding Gly to Ala substitutions of F proteins, such as modified SV5F provided herein, also can be inserted into the vector and tested for fusogenic activity (see SEQ ID NOS: 19-25). Exemplary of these are mutant SV5F sequences that have been artificially synthesized to contain flanking NheI and BamHI restriction sites such as set forth in any of SEQ ID NOS: 82-90 (each with a 5′ NheI sequence corresponding to nucleotides 1-6 and a 3′ BamHI sequence corresponding to nucleotides 1603 to 1608), and encoding a sequence of amino acids set forth in any of SEQ ID NOS: 44-51, respectively.

[0386] Other fusogenic genes (e.g., SEQ ID NOS: 6-18, 26-36), including modified genes designed to be human optimized and CpG-free and/or modified to have more fusogenic activity in “stand alone” form as discussed above, also can be artificially synthesized with flanking restriction sites (e.g., SEQ ID NOS: 70-78, 80-83, 91-101) for insertion into the pIRES2-zGFP vector. These include, but are not limited to, a wild type VSVG set forth in SEQ ID NO: 6 or a human codon optimized and CpG-free form (zVSVG) set forth in SEQ ID NO: 7, each encoding a sequence of amino acids set forth in SEQ ID NO: 38; a wild type AVRp10 set forth in SEQ ID NO: 8 or a human codon optimized, CpG free form (zAVRp10) set forth in SEQ ID NO: 9, each encoding a sequence of amino acids set forth in SEQ ID NO: 39; an AVRp10 S1133 variant set forth in SEQ ID NO:10 or a human codon optimized, CpG free form (zAVRp10(S1133)) set forth in SEQ ID NO:11, each encoding a sequence of amino acids set forth in SEQ ID NO: 40; and a wild type RRVp14 set forth in SEQ ID NO:12 or a human codon optimized, CpG free form (zRRVp14) set forth in SEQ ID NO:13, each encoding a sequence of amino acids set forth in SEQ ID NO:41.

[0387] For example, following ligation into the pIRES2-zGFP vector digested with NheI and BamHI, fusogenic intermediate vectors can be generated. The intermediate vectors can be named after the fusogenic gene contained therein. Exemplary of such vectors derived from pIRES2-zGFP include, for example, pCzARVp10-I-zGFP (SEQ ID NO: 715), pCzRRVp14-I-zGFP (SEQ ID NO: 716), pCzBRVp15-I-zGFP (SEQ ID NO: 717), pCzSV5F-I-zGFP (SEQ ID NO: 718), pCzVSVG-IzGFP (SEQ ID NO: 714), and pCzGALV-I-zGFP (SEQ ID NO: 713). The features of such vector constructs are set forth in FIG. 2D. Any of the experimental intermediate fusogenic vectors including any containing a fusogenic gene, or modified form thereof, can be tested for fusogenic activity as described in Section E below. For example, vectors containing the fusogenic genes or mutations thereof, can be transfected into cells, such as 293T cells, and examined for their ability to cause cell fusion. EGFP expression facilitates observation and evaluation of the formation of cellular syncytia as described in Section E below.

[0388] c. Tissue or Cell Specificity/Selectivity Competent Vectors

[0389] A third set of experimental intermediates vectors can be made by inserting into the pIRES2-zGFP or other intermediate or backbone construct a conditional promoter, such as a cell-cycle dependent promoter. Exemplary promoters, including cell cycle-dependent promoters, are set forth in Section B above. The promoter can be tested for its tissue-specific or cell-specific activity. Exemplary of promoters are cell cycle-dependent promoters, such as, for example, an E2F responsive promoter.

[0390] The cell-cycle promoter can be artificially synthesized to also contain flanking restriction sites to be easily inserted into a backbone or intermediate experimental vector provided herein. In particular examples, the cell cycle-dependent promoter is synthesized to containing a flanking AseI (ATTAAT; SEQ ID NO: 550) and NheI (GCTAGC; SEQ ID NO: 555) restriction sites, which permits insertion into the pC-T-I-zGFP vector or derivative thereof in place of the CMV promoter.

[0391] Exemplary of a cell cycle-dependent promoter is E2F1, which is turned off in the presence of tumor suppressor genes such as Rb family genes or p53, and thus is active in cells, such as tumor cells, that are deficient in these proteins. Exemplary E2F1 promoters are set forth in SEQ ID NO: 534 or SEQ ID NO: 535 (containing an A262T mutation), which each contain a 5′ AseI restriction site (corresponding to nucleotides 1-6) and a 3′ NheI restriction site (corresponding to nucleotides 274-279). E2F1 promoters that are modified by removing CpGmotifs are set forth in SEQ ID NOS: 536 and 537 (A262T mutant). Other truncated forms of the E2F1 promoter are set forth in any of SEQ ID NOS: 538-541. Each of the above sequences contains E2F1 promoters with a 5′ flanking AseI restriction sequence and a 3′ NheI restriction sequence. It is understood that similar promoter sequences can be generated or synthesized without flanking restriction sites or with any flanking restriction site sequence depending on the particular backbone vectors.

[0392] The activity of the conditional promoters contained in each of the above vectors can be tested in permissive (Rb−/− and/or p53−/−) tumor cells lines or normal cells such as is described herein, and promoter activity can be measured by plasmid copy number measured by qPCR and/or by EGFP fluorescence. Since E2F1 is a conditional promoter that is active in tumor cells, but not in normal cells, the resulting vectors can be tested to determine the replicative and fusogenic activities of the resulting vectors in cells deficient in, for example, p53 or Rb family members, as compared to normal cells, such as by using any of the assays described herein.

[0393] The best conditional promoter candidates can be identified from above, and can be integrated into experimental test vectors containing a replication component and/or an therapeutic component capable of bystander activity, such as any generated and tested in the subsections above. For example, a conditional promoter candidate can be subcloned into an intermediate series of vectors containing TAg or modified forms thereof. For example, the vector designated pC-T-I-zGFP (see FIG. 2C) can be digested with AseI and NheI to remove the CMV promoter, and any candidate promoter with the compatible restriction sites ligated therein. Thus, a series of vector combinations containing various permutations of E2F1 and SV40 TAg combined into one vector can be tested for cell cycle-specific replicative activity and/or transforming activity. The features of such resulting vectors are set forth in FIG. 2E.

[0394] In other examples, any conditional promoter candidate, such as any of the above E2F1 sequences, can be subcloned into an intermediate series of vectors containing an oncotherapeutic gene capable of bystander activity, or modified form thereof. For example, any vector with features set forth in FIG. 2D (e.g. pCzARVp10-I-zGFP, pCzRRVp14-I-zGFP, pCzBRVp15-I-zGFP, pCzSV5F-I-zGFP, pCzVSVG-I-zGFP and pCzGALV-I-zGFP) can be digested with AseI and NheI to remove the CMV promoter, and any candidate promoter with the compatible restriction sites ligated therein. Thus, a series of vector combinations containing various permutations of a candidate promoter, such as an E2F1 or modified form thereof, and an oncotherapeutic bystander gene combined into one vector can be tested for fusogenic activity. The features of the resulting vector are set forth in FIG. 2F.

[0395] 3. Integration of Constructs to Generate an Oncovector

[0396] Oncovector constructs, including those capable of bystander activity (e.g. fusogenic activity), can be developed based on the analysis of the above experimental intermediates and backbone vectors and integration of each of the components. For example, any of the above experimental intermediate constructs can be generated and tested to identify any one or more of a replication initiator, oncotherapeutic bystander gene, or cell-cycle dependent promoter, or modified forms thereof, to use in the resulting oncovector constructs. Any resulting construct can be developed to contain any one or more desired components, and to also contain unique restriction sites. Such unique restriction sites permit the further optimization and testing of components by facilitating integration of other fusogenic genes or mutants thereof, or other replication initiators or mutants thereof, including mutants of SV40 TAg.

[0397] Accordingly, once the best conditions and gene variants, from the therapeutic bystander activity-capable intermediates and the replication intermediates (e.g., containing SV40 TAg or modified SV40 TAg), are identified, the two elements can be combined into one test vector. In addition, the optimal cell cycle-dependent promoter can be added into this final vector. Further, an adjunct therapy gene also can be included. The components can be separate transcription units or can be contained within a single transcription unit. Thus, constructs containing combinations of elements from any of the above experimental intermediates can be combined and tested for activity.

[0398] To generate a final integrated construct, the transcription unit of an experimental construct containing the promoter, replication initiator, and/or therapeutic bystander gene is integrated into a backbone construct, such as any of the exemplary intermediate 1-4 backbone constructs set forth above and in Example 5.

[0399] Restriction sites engineered into the backbone constructs facilitate the integration and subcloning steps. For example, the transcription units of backbone constructs 1-4 are flanked by AseI and NotI restriction sites. Thus, an AseI/NotI digested transcription unit of any of the experimental vectors (see FIG. 2, e.g., CMV-TAg-IRES-zGFP; cell cycle-dependent (CCD) promoter-TAg, IRES-zGFP; CMV-oncotherapeutic bystander gene-IRES-zGFP; CCD promoter-oncotherapeutic bystander gene-IRES-zGFP; or any combination of integrated units such as CMV-oncotherapeutic bystander gene-IRES-TAg; CCD promoter-therapeutic bystander gene-IRES-TAg) can be ligated into an intermediate backbone vector, such as Intermediate 3 or Intermediate 4 backbone construct, at the unique AseI-NotI cloning sites. For example, a transcription unit from an experimental intermediate construct containing a CMV promoter or a CCD promoter, human optimized and CpG-free SV5F fusogenic gene, an EMCV IRES, and a human optimized CpG-free TAg can be generated by digestion of an experimental intermediate construct with AseI/NotI. The recipient Intermediate 4 vector also can be digested with AseI/NotI for ligation of the digested fragment by standard procedures. Exemplary of such a resulting vector is set forth in FIG. 3E (containing a CMV promoter) and FIG. 3F (containing a CCD promoter). The resulting constructs can be tested for replication, oncotherapeutic, and bystander activities.

[0400] Table 14 below sets forth exemplary components of an oncovector construct, such as an oncovector construct depicted in FIG. 3F, including exemplary restriction sites that permit substitution of any one or more of the components. It is understood that the order of the components can be reversed or altered. For example, the replication initiator (e.g. SV40-TAg) need not be contained on the same nucleic acid molecule construct as the cognate origin of replication, but can be contained on a separate nucleic acid molecule for expression therefrom, or can be stably expressed from a recipient cell line. Also, the order of the therapeutic bystander gene and replication initiator can be reversed. In addition, in some examples, the therapeutic bystander gene, or replication gene, can be removed and replaced with a reporter gene, such as for example, a gene encoding a fluorescent protein (e.g. GFP, RFP, or mKate), Luciferase or beta-galactosidase. In further examples, the therapeutic bystander gene can be removed or replaced with another adjunct therapy gene. In some examples, the nucleic acid construct can contain a single transcription unit for replicative, therapeutic, and bystander activities. In other examples, the nucleic acid construct can additionally contain a transcription unit for adjunct gene therapy.

TABLE 14
Summary of Components in an Exemplary Oncovector Construct

| Restriction | |
|---|---|
| Sites | Component |
| AseI-NheI | Cell cycle-dependent promoter (e.g., E2F-like, |
| | telomerase-like, or modified forms thereof) |
| NheI-BamHI | Oncotherapeutic Bystander Gene (e.g., VSVG, |
| | SV5F, ARVp10, RRVp14, BRVp15, CDase, or |
| | modified forms thereof) |
| BamHI-BstXI | IRES (e.g., EMCV, CPLV) |
| BstXI-NotI | Replication initiator (e.g., TAg, including |
| | modified forms thereof such as human codon |
| | optimized and CpG fee, or a mutant thereof) |
| NotI-SexAI | Synthetic pA signal |
| SexAI-PacI | Origin (e.g., SV40 early promoter/ori, or |
| | modified form thereof) |
| PacI-PflFI | Bacterial promoter; antibiotic resistance |
| | gene (e.g., Kan/NeoR, or modified form |
| | thereof); synthetic pA |
| PflF1-BglII | Cell cycle-dependent promoter, or modified |
| | form thereof; adjunct therapy gene (e.g., |
| | HSV1-TK, CDase, cytokine, Chemokine, or |
| | modified form thereof); synthetic pA |
| BglII-Ase1 | Bacterial origin of replication (e.g., pUC |
| | origin or modified form thereof) |

[0401] The features of an exemplary final oncovector construct are set forth in FIG. 2G. In this example, candidate E2F-like promoter, candidate oncotherapeutic bystander gene and/or candidate SV40-TAg are identified from the generation and testing of the experimental vectors as described above and used to generate a final construct. It is understood that FIG. 2G is exemplary only and that a resulting oncovector construct can contain any cell type- or tumor-specific promoter of choice that exhibits cell type-specific promoter activity, any oncotherapeutic bystander gene that exhibits oncotherapeutic and bystander activities and/or any replication initiator that exhibits replicative activity but no or little transformation activity. Also, it is understood that the order of the components also can be varied. Typically, the resulting construct is bicistronic such that the replication initiator and the fusogenic gene are expressed under the same promoter, but this is not required. For example, the replication initiator and fusogenic gene can be expressed under different promoters that are the same or different. The construct also can be generated to contain a further adjunct therapy gene, reporter gene or other gene of interest, which is exemplified in FIG. 2H.

[0402] The constructs can be tested against a series of cell lines, both cancerous and normal, for oncotherapeutic, bystander, and replicative activities. These studies can be designed to determine which cell types are permissive to the self-replication, oncotherapeutic, and bystander actions of the construct.

[0403] Control constructs also can be generated. For example, replicative (e.g. designated BB3) and non-replicative (designated dSV) vector pairs can be generated that are identical except for their ability to support autonomous replication. As discussed above, exemplary oncovectors provided herein are autonomous replicating plasmids (ARPs) because they contain an SV40 TAg in combination with the SV40 ori region so that plasmid replication and amplification of the transgenes contained therein (e.g. a reporter or fusogenic gene) is achieved. Multimers of the TAg bind to GAGGC motifs (SEQ ID NO: 122) within the core of the SV40 ori. The wild type SV40 recognition sequence contains 4 TAg binding domains (two in forward and two in reverse orientation) within the core TAg binding domain (GAGGCGGAGGCCGCCTCGGCCTC; SEQ ID NO: 123) of the SV40 ori, which initiates DNA replication. A replication competent vector (e.g., BB3) includes the core TAg binding sites of the SV40 ori and all or some of a 5′ enhancer region. A replication incompetent vector (e.g., dSV) lacks the core TAg binding sites of the SV40 ori and some or all of the 5′ enhancer regions. Also, for the replication incompetent control vector, the nucleic acid molecule also can include a unique linker sequence added for recognition, for example for diagnostic purposes. Exemplary of such a linker sequence added for recognition is GGAGGGGAGGAGG (SEQ ID NO: 678). For example, the dSV ori sequence (including 5′ SexAI restriction site, reduced 5′ enhancer, linker and a 3′ PacI restriction site) can be reduced to the region ACCTGGTTAGGAGGGGAGGAGGATTAATAA (SEQ ID NO: 111). Hence, the replication incompetent plasmid designated dSV is typically 100 base pairs shorter than the BB3 SV40 ori.

### E. METHODS OF PRODUCING ONCOVECTOR CONSTRUCTS

[0404] Any suitable method for generating oncovector constructs can be used. Exemplary methods for generating nucleic acid molecules, including any of the constructs provided herein, are provided. Such methods include in vitro synthesis methods for nucleic acid molecules such as PCR, standard cloning methods, synthetic gene construction such as by using overlapping oligos, and in vitro ligation of isolated and/or synthesized nucleic acid fragments. In one example, nucleic acid molecules for any of the components of the constructs provided herein, can be isolated by cloning methods, including PCR or RNA and DNA isolated from primary cells or transfected cells. In another example, nucleic acid molecules for any of the components of the constructs provided herein can be artificially synthesized.

[0405] 1. Synthetic Genes and Peptides

[0406] Nucleic acids molecules can be synthesized by methods known to one of skill in the art using synthetic gene synthesis. For example, individual oligonucleotides corresponding to fragments of a construct sequence of nucleotides are synthesized by standard automated methods and mixed together in an annealing or hybridization reaction. Thus, in some strategies, synthetic genes are assembled from a large number of short partially overlapping DNA oligonucleotides, generally about 100 nucleotides in length. Such oligonucleotides can be commercially obtained, such as from Integrated DNA Technologies (Coralville, Iowa). Adjacent overlapping oligonucleotides contain sequences from opposite strands of the desired gene and have complementary overlapping ends. These segments are allowed to anneal and then assembled into longer double-stranded DNA, for example, by ligation and/or polymerase extension reactions, either alone or in combination. Single nucleotide “nicks” in the duplex DNA are sealed using ligation, for example with bacteriophage T4 DNA ligase. Such strategies are variously referred to as “assembly PCR,” “splicing by overlap extension,” “polymerase chain assembly” and others. In another, similar method, a series of overlapping oligonucleotides are prepared by chemical oligonucleotide synthesis methods. Annealing of these oligonucleotides results in a gapped DNA structure. DNA synthesis catalyzed by enzymes such as DNA polymerase I can be used to fill in these gaps, and ligation is used to seal any nicks in the duplex structure. PCR and/or other DNA amplification techniques can be applied to amplify the formed linear DNA duplex.

[0407] Additional nucleotide sequences can be joined to a nucleic acid molecule by gene synthesis methods, including, for example, linker sequences containing restriction endonuclease sites for the purpose of cloning the synthetic gene into a backbone construct vector. Furthermore, additional nucleotide sequences specifying functional DNA elements can be operatively linked to a nucleic acid molecule. Examples of such sequences include, but are not limited to, regulatory sequences such as promoter sequences or sequences that facilitate the purification and/or detection of an expressed polypeptide. For example, a fusion tag such as an epitope tag or fluorescent moiety can be fused or linked to a nucleic acid molecule.

[0408] Hence, such a strategy can be used to synthesize individual components of the constructs, which can be used in conventional cloning procedures. Thus, in one example, restriction endonuclease linker sequences are added to the 3′ and 5′ flanking ends of a synthesized gene. Such restriction sites then can be used to insert the synthetic gene into any of one of a variety of backbone construct vectors. For example, restriction sites can be introduced into synthesized genes to permit the insertion of the resulting gene fragment into the pIRES2-EGFP backbone construct, or any one or more of the experimental intermediate constructs provided herein, or into any one or more of the intermediate backbone constructs provided herein such as Intermediate 3 (set forth in SEQ ID NO: 4) or Intermediate 4 (set forth in SEQ ID NO: 5).

[0409] Synthetic gene synthesis techniques also can be used to generate a complete construct. For example, generating a 5-6-kb segment of DNA from synthetic oligonucleotides has become routine (see e.g., Smith et al. (2003) Proc. Natl. Acad. Sci., 100:11440-15445).

[0410] 2. Methods of Cloning and Isolating Component Genes

[0411] Components of nucleic acid constructs provided herein, can be cloned or isolated using any available methods known in the art for cloning and isolating nucleic acid molecules. Such methods include PCR amplification of nucleic acids and screening of libraries, including nucleic acid hybridization screening, antibody-based screening and activity-based screening.

[0412] For example, methods for amplification of nucleic acids can be used to isolate nucleic acid molecules for any one or more of the components provided herein. Such amplification methods include polymerase chain reaction (PCR) methods. A nucleic acid containing material can be used as a starting material from which a desired nucleic acid molecule can be isolated. For example, DNA and mRNA preparations, cell extracts, tissue extracts, fluid samples (e.g., blood, serum, saliva), samples from healthy and/or diseased subjects, or vectors or plasmids can be used in amplification methods. Nucleic acid libraries also can be used as a source of starting material. Primers can be designed to amplify a nucleic acid molecule. For example, primers can be designed based on the known sequence of one or more components. Thus, a nucleic acid sequence for one or more components of a construct provided herein can be PCR amplified using primers that hybridize to opposite strands and flank the region of interest in a target DNA. Cells or tissues or other sources known to express a target DNA molecule, or a vector containing a sequence for a target DNA molecule, can be used as a starting product for PCR amplification events. Nucleic acid molecules generated by amplification can be confirmed by sequencing.

[0413] PCR primers used in the PCR amplification also can be engineered to facilitate the operative linkage of nucleic acid sequences. For example, non-template complementary 5′ extensions can be added to primers to allow for a variety of post-amplification manipulations of the PCR product without significant effect of the amplification itself. For example, these 5′ extensions can include restriction sites, promoter sequences, restriction enzyme linker sequences, a protease cleavage site sequence or sequences for epitope tags.

[0414] 3. Methods of Generating and Cloning Constructs

[0415] Constructs provided herein contain multiple components. For example, minimally a construct provided herein contains an origin of replication, a promoter and a fusogenic gene. Generally, such constructs also contain a replication initiator to enable self-replication. The constructs also can contain other components such as, but not limited to, a reporter gene, an antibiotic resistance gene, a gene encoding an adjunct therapeutic protein such as a prodrug, cytokine or chemokine and others.

[0416] Such constructs can be prepared using conventional techniques of enzyme cutting and ligation of fragments from desired sequences. For example, as described above, desired sequences can be synthesized by PCR with overlapping PCR oligonucleotides, isolated from the DNA of a parent cell which expresses the gene by appropriate restriction enzyme digestion, or obtained from a target source, such as a cell, tissue, vector, or other target source. In any of the above examples, the resulting fragment can be designed to contain 3′ and 5′ flanking restriction sites. Thus, in one example, constructs can be generated by successive rounds of ligating DNA target sequences, amplified by PCR, into a backbone construct at engineered recombinations sites. The PCR amplified product can be subcloned into a backbone construct for further recombinant manipulation of a sequence, for example, in order to create intermediate constructs or to generate a final integrated construct.

[0417] In one example, incorporation of restriction enzyme sites into a primer can facilitate subcloning of the amplification product into a backbone vector that contains a compatible restriction site, such as by providing sticky ends for ligation of a nucleic acid sequence. Subcloning of multiple PCR amplified products into a single vector can be used as a strategy to operatively link or fuse different nucleic acid sequences to generate the constructs provided herein. Other methods for subcloning of PCR products into vectors include blunt end cloning, TA cloning, ligation independent cloning, and in vivo cloning.

[0418] The creation of an effective restriction enzyme site into an artificially synthesized gene or into a primer to amplify a desired gene requires the digestion of the PCR fragment with a compatible restriction enzyme to expose sticky ends, or for some restriction enzyme sites, blunt ends, for subsequent subcloning. There are several factors to consider in engineering a restriction enzyme site so that it retains its compatibility for a restriction enzyme. First, the addition of 2-6 extra bases upstream of an engineered restriction site can greatly increase the efficiency of digestion of the amplification product. Other methods that can be used to improve digestion of a restriction enzyme site by a restriction enzyme include proteinase K treatment to remove any thermostable polymerase that can block the DNA, end-polishing with Klenow or T4 DNA polymerase, and/or the addition of spermidine. An alternative method for improving digestion efficiency of synthesized fragments or PCR products also can include concatamerization of the fragments after amplification. For example, this is achieved by first treating the cleaned up PCR product with T4 polynucleotide kinase (if the primers have not already been phosphorylated). The ends may already be blunt if a proofreading thermostable polymerase such as Pfu was used or the amplified PCR product can be treated with T4 DNA polymerase to polish the ends if a non-proofreading enzyme such as Taq is used. The PCR products can be ligated with T4 DNA ligase. This effectively moves the restriction enzyme site away from the end of the fragments and allows for efficient digestion.

[0419] Prior to subcloning of a PCR product containing exposed restriction enzyme sites into a backbone construct vector, it is sometimes necessary to resolve a digested PCR product from those that remain uncut. In such examples, the addition of fluorescent tags at the 5′ end of a primer can be added prior to PCR. This allows for identification of digested products since those that have been digested successfully will have lost the fluorescent label upon digestion.

[0420] In some instances, the use of artificially synthesized fragments or amplified PCR products containing restriction sites for subsequent subcloning into a vector for the generation of a construct can result in the incorporation of restriction enzyme linker sequences in the construct, and the resulting expressed proteins. Generally such linker sequences are short and do not impair the function of a polypeptide so long as the sequences are operatively linked.

### F. ASSAYS TO ASSESS OR MONITOR ACTIVITIES OF ONCOVECTOR CONSTRUCTS

[0421] The activities and properties of the oncovector constructs can be assessed in vitro and/or in vivo. Assays for such assessment are known to those of skill in the art and are known to correlate tested activities and results to therapeutic and in vivo activities. Exemplary in vitro and in vivo assays are provided herein to assess the biological activity of oncovector constructs. In addition, numerous assays for biological activities of oncovector constructs are known to one of skill in the art, and any assay known to assess the activity of an oncovector construct can be chosen depending on the specific activity and/or property of the oncovector construct to be tested. Exemplary activities and/or properties of the oncovector construct that can be assessed include replication, effect on cell fusion, cell transformation, and expression. For all assays, positive and negative control oncovector constructs can be subjected to the same procedures for comparison.

[0422] In vitro assays include any laboratory assay known to one of skill in the art, such as for example, cell-based assays including dye transfer, syncytium formation, and anchorage independence. For example, in vitro assays can be performed following transfection of the oncovector constructs into any desired cells. Methodologies of transfection are known to one of skill in the art and include, but are not limited to, calcium phosphate, electroporation, heat shock, magnetofection, and the use of cationic lipids such as Lipofectamine™, Fugene®, Lipofectin™, Optifect™ and others known to one of skill in the art. One of skill in the art can determine which cell type should be transfected and by which transfection method, based on empirical determination. Exemplary of cell lines include, but are not limited to 293T cells, COS cells, CHO cells, HeLa cells, HEK293, THP-1, A549, Caco-2, HT29, MCF-7, NIH-3T3, WI-38, SAOS-2, 293T/17, U-2OS, and HT-1080. Cells lines also can include cells deficient in tumor suppressor proteins such as p53−/− and/or Rb−/− cells. For example, the human colon cancer cell line HCT116 (p53+/+) can be used in any experiments described herein and compared to its derivative cell line HCTp53KO (p53−/−), which has both p53 alleles disrupted (Bunz et al. (1998) Science, 282:1497-501). Other p53 deficient cells include PC3 cells (p53−/−) and their stable p53 transfectant PC3-p53 counterpart (Hastak et al. (2005) 19: 789-791). Rb−/− cells also can be used such as SA0S-2 cells; BC5637 cells (Rb−/−), which can be compared to a pRB+ clone 5637-RB-5 (Schnier et al. (1996) Proc. Natl. Acad. Sci, 93:5941-5946), and the prostate cancer cell line DU145 (Mack et al. (1999) Clinical Cancer Research, 5:2596-2604).

[0423] In vivo assays include animal model assays as well as administration to humans. Animal models include disease models in which a biological activity can be observed and/or measured. Dose response curves of an oncovector construct in such assays can be used to assess modulation of biological activities and as well as to determine therapeutically effective amounts of an oncovector construct for administration.

[0424] Also, in any of the assays described below, the experiments can be performed in the presence of a stuffer plasmid. The goal of using a stuffer plasmid is to reduce the copy number of construct per cell. Thus, when the constructs replicate they can be optimized to exhibit a more robust copy number differential. Thus, in order not to overload the system and to test for true self-replication, replication assays, fusion assays and other assays can be performed by diluting any of the constructs provided herein with a neutral stuffer plasmid. Exemplary of a neutral stuffer plasmid is the backbone of a synthetic vector pCpG-SEAP (Invivogen), with the full transcription unit removed, including promoter, reporter gene and pA sequences) (SEQ ID NO: 482). The resulting 1950 base pair plasmid is devoid of CpG motifs and does not contain a pUC ori, and SV40 ori or a Kan/NeoR gene. Therefore, there should be no competition for transfactors and no promoter interference.

[0425] Exemplary assays are described below. The assays described below can be adapted for in vitro or in vivo analyses.

[0426] 1. Replication Assays

[0427] The assays for replication described herein can be used to detect, measure, or quantify replication of the oncovector constructs provided herein. Replication of the nucleic acid molecules can be mediated by non-viral (e.g., bacterial components) or viral mechanisms, including retrovirus systems and DNA-based virus systems. Generally, the constructs are episomally expressed and replicate extrachromosomally in host cells.

[0428] Replication assays can include detection through fluorescence, spectrophotometric, radioactive, immunological, radioimmunological and hybridization methods. Replication assays include qualitative comparison of the replication levels of different oncovector constructs and quantitative detection of copy number. More than one replication assay can be used on the same or different samples. Replication assays can be validated by comparing the results to one or more different replication assay(s). If the oncovector constructs include a reporter gene, replication assays can be validated by assessing the relationship between replication levels and activity of the reporter gene. Any reporter gene known to one of skill in the art can be used, such as, for example, enhanced green fluorescent protein (EGFP).

[0429] Replication assays can be used to determine the effect of mutations of the oncovector constructs on replication. Such mutations can include, but are not limited to, removal of CpG motifs, codon optimization, mutation of the origin of replication, mutation of the fusogenic protein, mutation of the prodrug activating enzyme, and mutation of the promoter or promoters.

[0430] In one non-limiting example, the oncovector construct contains a replication initiator, and constructs that have different mutations in the replication initiator are assayed to identify replication initiator mutants that retain the ability to initiate replication. The replication initiator can be the large T antigen of a papovavirus. The replication initiator can be SV40 large T antigen. For example, the replication initiator is a mutant SV40 large T antigen, and oncovector constructs are assayed to identify mutations in SV40 that do not impair replication of the oncovector constructs, but limit transformation of normal cells into cancerous cells. For example, the replication initiator is a mutant SV40 large T antigen, where one or more mutations are selected from those listed in Table 3 or 4.

[0431] In one embodiment, the oncovector constructs replicate in a specific and selective manner so that the construct accumulates in a predetermined cell or tissue, such as, for example, a disease-specific cell or tumor cell. In another embodiment, the oncovector construct contains a replication initiator under control of a promoter selective for expression in a predetermined cell or tissue, such as, for example, a disease-specific cell or tumor cell. In a further embodiment, the diseased cells are cancer cells. In a further embodiment, the oncovector construct contains a replication initiator under control of a promoter selective for expression in cancerous cells.

[0432] a. Incorporation of Detectable Nucleoside and/or Nucleotide Analogs

[0433] Cells can be assayed for replication of the oncovector constructs by incorporation and detection of nucleoside and/or nucleotide analogs. Such analogs and methods are known in the art and include, for example, bromodeoxyuridine (BrdU), and immunocytochemistry, respectively. For example, cells containing SV-T can be labeled with BrdU for minutes, hours or days. During exposure to BrdU, the cells can be kept in the dark to minimize DNA damage. After labeling, cells are washed, fixed, washed again, and permeabilized with any suitable reagent such as, for example, Triton X-100. Subsequently, the cells are washed again, blocked, and incubated with primary antibodies to SV-T and primary antibodies to BrdU. The antibodies can be polyclonal serum or monoclonal antibodies. Benzon nuclease can be added to increase access of the antibodies to the DNA.

[0434] The primary antibodies for SV-T and BrdU are selected from different species so that labeled secondary antibodies allow independent detection of SV-T and BrdU. In one non-limiting example, the primary antibodies are rabbit polyclonal antiserum raised against SV-T and a murine monoclonal antibody against BrdU, and the cells are stained with fluorescein-coupled goat anti-rabbit antibody and Texas Red-coupled swine anti-mouse antibody. By comparing immunofluorescence, the fraction of cells positive for T-antigen that incorporate BrdU can be determined. Background levels of negative control cells without SV-T can be subtracted (Dickmanns et al., J. Virol. 68(9):5496-5508 (1994)).

[0435] b. Real-Time Polymerase Chain Reaction (qPCR)

[0436] Copy number of the oncovector constructs can be determined by real-time polymerase chain reaction (qPCR) (Shadrina et al. (2007), BMC Medical Genetics, 8:6; Wilhelm et al. (2003), Chembiochem 4(11):1120-1128; Ayra et al. (2005), Future Drugs 5(2):209-219; Lee et al. (2006), J. Microbiol. Methods 65:258-267). Whereas endpoint PCR can be semi-quantitative due to saturation in the final stages of amplification, qPCR can provide a wide dynamic range for linear quantitative detection. Furthermore, qPCR has high sensitivity that allows determination using low amounts or with low abundance of biological samples (Lee et al. (2006), J. Microbiol. Methods 65:258-267), although use is not limited to those instances.

[0437] Any qPCR assay known to one of skill in the art is contemplated. For example, various chemistries are available for qPCR, including DNA intercalating agents, hydrolysis probes, dual hydrolysis probes, molecular beacons, and scorpion probes, (Ayra et al. (2005), Future Drugs 5(2):209-219). In one example, qPCR can be used to monitor fluorescence levels during PCR. The method can use the dye SYBR Green, which fluoresces upon binding to double stranded DNA. Dilutions of pure DNA with known concentrations can establish a standard curve for comparison, to provide the initial template concentration (Lee et al. (2006), J. Microbiol. Methods 65:258-267.

[0438] c. Southern Blot Analysis

[0439] Replication of oncovector constructs can be assayed by Southern blot analysis (Ziegler et al. (2004), J. Virological Methods 122(1):123-127). One of skill in the art knows different detection methods that can be used for Southern blot and can choose an appropriate detection method depending on the particular circumstances of the assay. For example, probes for use in Southern blot analysis can be radioactive or have biotin tags for immunodetection.

[0440] d. DpnI Digestion

[0441] Extrachromosomal replication can be assayed by determining if Hirt supernatant DNA is partially resistant to digestion by DpnI (Peden et al. (1992), Virus Genes 6(2):107-118); Campbell et al. (1997), Genes & Dev. 11:1098-1110). Whereas plasmid DNA prepared in DNA adenine methylase positive bacteria are methylated at adenine nucleotides in the sequence GATC, mammalian cells lack this enzyme, and hence human DNA is resistant to digestion by DpnI. Therefore, Hirt DNA that is digested by DpnI does not indicate episomal replication. In contrast, Hirt DNA that is largely resistant to digestion by DpnI indicates extrachromosomal replication.

[0442] e. Binding of SV40 TAg to SV40 Origin of Replication

[0443] The wild-type and/or mutant SV-T can be assayed for binding to the SV40 origin of replication. In one non-limiting example, radiolabeled DNA containing the SV40 origin of replication is incubated with extracts of cells containing SV40 TAg or control cells. The reaction is immunoprecipitated, and analyzed by electrophoresis and autoradiography (Cole et al. (1986), J. Virol. 57(2):539-546).

[0444] 2. Cell Fusion Assays

[0445] The oncovector nucleic acid molecules provided herein include a gene that expresses a fusogenic protein, which when expressed by a cell causes cell fusion with neighboring cells. Cell fusion induced by any of the oncovector constructs provided herein can be assayed by any method known to one of skill in the art, examples of which are described herein. The fusogenic genes contained within the constructs include any provided herein or any known to one of skill in the art, such as any wild-type fusogenic gene and fusogenic genes that contain one or more mutations, such as 1, 2, 3, 4, 5 or more mutations.

[0446] Cell fusion involves mixing of both the outer and inner leaflet membrane lipids as well as mixing of the aqueous contents of donor and recipient cells (Kemble et al. (1994), Cell 76:383-391). Therefore, methods to assay for cell fusion can include analysis of lipid mixing of cells, content mixing of cells, and a combination of lipid and content mixing of cells. Cell fusion assays can be used to qualitatively compare activity of different fusogenic proteins expressed from the oncovector constructs. Cell fusion assays can be used to quantitatively compare the kinetics of cell fusion. Any cell fusion assay known to one of skill in the art can be used to assay oncovector constructs for their cell fusion properties.

[0447] In some examples, cell populations can be selected such that one is smaller than the other to facilitate distinction between the two populations (Cheng et al. (2005), J. Virol. 79(3):1853-1860). For example, normal cells and tumor cell populations can be mixed in order to assay for the specific accumulation of the constructs in tumor cells and induction of tumor cell fusion. If necessary, the tumor cells versus normal cells can be labeled with different dyes in order to visualize selective fusion.

[0448] Further, fusion assays can be performed to determine any bystander effect, i.e. the ability of oncovector constructs to facilitate fusion of bystander cells that themselves do not express the fusogenic protein. The goal is to select an amount of oncovector construct that accumulates in the desired cell or tissue, such as a tumor cell, and to thereby selectively induce fusion of those cells, while at the same time not being leaky so as to induce fusion of neighboring cells. Accordingly, fusion assays can be designed to test for the bystander effect. In such examples, the construct can be diluted such that the number of transfected cells is small. The cells can then be assayed for fusion using any of the assays described below. Generally, in performing such experiments, the oncovector construct also expresses some other reporter or detectable gene so that it is possible to identify those cells that have been transfected.

[0449] In addition, assays can be performed to test for the specificity of fusion based on cells that have accumulated the construct, for example, due to the presence of a conditional promoter that drives gene transcription. In such experiments, normal cells and the cell for which the oncovector construct is designed to accumulate can be co-transfected with the oncovector construct in mixing experiments. For example, normal cells and tumor cells (deficient or absent in p53 or an Rb family member) can be mixed. The different cell types can be mixed at various ratios. Fusion of the cells can be assayed to determine the specificity of the fusogenic activity of the oncovector construct for the designated cell type as compared to normal cells. Differentiation of the cell types can be facilitated by differentially labeling the cells, for example, with cell surface dyes known to one of skill in the art.

[0450] The assays described herein are exemplary in nature and not meant to be limiting.

[0451] a. Fluorescence Dequenching

[0452] An exemplary assay used to measure lipid and/or content mixing is fluorescence dequenching (Bagai et al. (1996), J. Cell Biol. 135(1):73-84; Danieli et al. (1996), J. Cell Biol. 133(3):559-569). In this method, cells containing a fusogenic protein or a gene that encodes a fusogenic protein are allowed to fuse with smaller cells labeled with one or more fluorescent labels. The fluorescent labels can be membrane probes, aqueous probes, or both membrane and aqueous probes. Dilution of the fluorescent label, due to cell fusion, results in fluorescence dequenching. In an exemplary assay, the fluorescently labeled cells are erythrocytes. For example, the fluorescently labeled cells can be labeled with the lipid probe octadecyl rhodamine B (R18). Any method known to one of skill in the art can be used to measure, detect, or visualize fluorescence dequenching. For example, fluorescence dequenching can be measured using a spectrofluorometer or by microscopy, such as, for example, confocal microscopy. Measurements can be made using a spectrofluorometer to detect fluorescence changes as a result of fusion of R18-labeled erythrocytes with acceptor cells. To normalize the data, percentage fluorescence dequenching (% FDQ) can be calculated according to the equation % FDQ=100•(F−F₀/Fₜ−F₀), where F₀ and F are fluorescence intensities at time 0 and at a given time point, and Fₜ is the fluorescence intensity in the presence of 0.1% Triton X-100 and is defined as fluorescence at “infinite” dilution of the probe (Dutch et al. (1998), J. Virol. 72(10):7745-7753). In one suitable assay, kinetics of lipid mixing activity are calculated from initial rates of fluorescence dequenching as measured by the maximum slopes of the curves (see e.g., Bagai et al. (1997), Virology 238:283-290; Bagai et al., J. Virol. 67, 3312-3318 (1993)).

[0453] b. Dye Transfer

[0454] Cells can be labeled with one or more detectable probes and incubated with cells containing the fusogenic protein and/or fusogenic gene to be tested. Fusion is detected by monitoring the distribution of the detectable probes. Exemplary detectable probes include, for example, fluorescent dyes. One of skill in the art knows how to select suitable probes for detection as well as methods to detect the probes. For example, fluorescent probes can be detected by fluorescence microscopy and/or by confocal microscopy. Cells can be labeled at the cell membrane, the cell interior, or both the cell membrane and the cell interior. A lipophilic label can be used to label cell membranes, and an aqueous dye can be used to label the interior of cells. Cells can be labeled with different labels at the cell membrane and at the cell interior. Cells can be labeled with the same label at the cell membrane and at the cell interior.

[0455] In some exemplary assays, the labeled cells are red blood cells (RBCs). In some exemplary assays, cell membranes are labeled with the lipophilic probe dye octadecyl rhodamine B (R18) (Bagai and Lamb (1996) J. Cell Biol., 135:73-84; Bagai and Lamb (1995) J. Virol. 69:6712-6719). In one example of an assay, red blood cells are labeled with R18 and incubated with cells that express a fusogenic protein. Following incubation, confocal microscopy is used to detect dye transfer from the labeled RBCs to the cells that express the fusogenic protein. Measurements can be made at varying time points in order to determine kinetics of cell fusion by measuring the rate of dye transfer.

[0456] In one non-limiting example of an assay for cell fusion, the interior of the labeled cells is labeled by entrapment with an aqueous dye, such as, for example N-(7-nitrobenz-2-oxa-1,3 diazol-4-yl)aminoethanosulfonic acid-taurine (NBD-taurine) (Sarkar et al., J. Cell Biol. 109:113-122 (1989)). In another example, one cell population can be labeled with a content probe, such as, for example, calcein. Cell populations can be selected such that one is smaller than the other to facilitate distinction between the two populations (Cheng et al. (2005), J. Virol. 79(3):1853-1860)

[0457] c. Content Mixing

[0458] Assays for cell fusion include assays that are dependent on the mixing of the aqueous contents of two different cell populations (see e.g., Nussbaum et al. (1994), J. Virol. 68:5411-5422; Bagai et al. (1996), J. Cell Biol. 135(1):73-84; Bagai et al. (1995), J. Virol. 69(11):6712-6719; Earp et al. (2003), J. Virol. 77(5):3058-3066).

[0459] In one example, fusion of two distinct cell populations can activate a reporter gene by content mixing. In one suitable assay, the first cell population contains bacteriophage T7 RNA polymerase; the second cell population contains lacZ gene linked to the T7 promoter. Either or both of the cell populations can contain the fusogenic protein. Cell fusion can be analyzed by any method known to one of skill in the art (e.g. X-gal staining and visualization of cells or quantitative colorimetric assay (see e.g., Nussbaum et al. (1994), J. Virol. 68:5411-5422).

[0460] d. Syncytium Formation

[0461] Cell fusion can be assayed by visual qualitative or quantitative detection of syncytia (Corcoran et al. (2006), J. Biol. Chem. 281(42):31778-31789; Dupressoir et al. (2005), Proc. Natl. Acad. Sci. USA 102(3):725-730). In one example, two cell populations are labeled with dyes of different colors, such as, 5-(6)-(((4-chloromethyl)benzoyl)amino)-tetramethylrhodamine and 7-amino-4-chloromethylcoumarin. Fluorescence microscopy can be used to reveal the presence of syncytial foci containing nuclei of both colors, indicating cell fusion. The number of syncytial nuclei per field can be determined by counting random microscopic fields and the percent fusion can be calculated relative to a negative or positive control (Corcoran et al., J. Biol. Chem. 281(42):31778-31789 (2006)). A fusion index can be calculated as [(N−S)/T]×100, where N is the number of nuclei in the syncytia, S is the number of syncytia, and T is the total number of nuclei counted (Dupressoir et al. (2005), Proc. Natl. Acad. Sci. USA 102(3):725-730).

[0462] 3. Assays for Transformation of Normal Cells to Cancerous Cells

[0463] The SV40 T antigen (SV-T) has binding sites for HSP70, the tumor suppressor retinoblastoma protein (Rb) (Zalvide et al. (1998), Mol. Cell. Biol. 18(3):1408-1415; Stubdal et al. (1996), J. Virol. 70(5):2781-2788; Thompson et al. (1990), Virology 178:15-34; Sullivan et al. (2002), Microbiol. Mol. Biol. 66(2):179-202; Ludlow et al. (1990), Cell 60:387-396), and the tumor suppressor protein p53 (Tack et al. (1989), J. Virol. 63(8):3362-3367; Pipas et al. (2001), Seminars Cancer Biol. 11:23-30. SV-T can cause transformation of normal cells to cancerous cells (Bennoun et al. (1998), Oncogene 17:1253-1259; Ahuja et al. (2005) Oncogene 24:7729-7745, Srinivasan et al. (1989), J. Virol. 63(12):5459-5463). In order to use the wild-type or mutant SV-T for use in the oncovectors, mutant SV-T proteins will be used that retain replication properties, but do not induce transformation.

[0464] Any method known to one of skill in the art to distinguish a normal cell from a transformed cell can be used to measure transformation of SV-T. For example methods can be used where cells are subjected to conditions in which transformed cells grow, but normal cells do not grow. The following list of methods to assay for transformation of normal cells to cancerous cells is exemplary and not meant to be limiting.

[0465] a. Immortalization

[0466] When passaged, normal primary cells eventually undergo growth arrest and irreversible senescence. In contrast, some types of transformed cells exhibit immortalization Immortalization assays can be used to test for transformation (Kierstead et al. (1993), J. Virol. 67(4):1817-1829). For example, mouse embryo fibroblasts or rat embryo fibroblasts expressing large T antigen are immortal and propagate in culture for an indefinite period. Some cell types have additional requirements to exhibit immortalization when transformed. For example, human fibroblasts expressing large T antigen can be propagated for extended periods in culture but eventually senesce. An active telomerase is required to escape senescence in these cells (Ahuja et al. (2005), Oncogene 24:7729-7745).

[0467] One of skill in the art can determine which types of cells exhibit immortalization when transformed and is able to select appropriate cells to use for immortalization assays. For example, primary cells are unlikely to have acquired cellular mutations that might yield false positives. In addition, cells that rapidly senesce in culture, if seeded at low cell density, do not divide enough times to form colonies. In that event, it is not necessary to use a dominant selectable marker to eliminate nontransfected cells, and a monolayer does not form in flasks, avoiding dual selection for immortalization and dense focus formation (Kierstead et al. (1993), J. Virol. 67(4):1817-1829).

[0468] b. Growth in Low Serum

[0469] Transformed cells can be identified by proliferation and/or survival in medium lacking sufficient serum for normal cells to proliferate and/or survive. For example, normal fibroblasts require serum-supplemented medium to proliferate and survive, while SV40-transformed cells can proliferate and survive in medium with little or no serum (Ahuja et al. (2005), Oncogene 24:7729-7745).

[0470] c. Saturation Density

[0471] Contact of fibroblasts with adjacent cells arrests cell growth so that growth of fibroblasts in a culture disk typically terminates in a monolayer of cells. Transformed cells can be identified by increased saturation density, which is the maximum number of cells per unit area of culture surface. For example, SV40-transformed cells do not arrest cell growth upon reaching a monolayer but rather reach higher or indefinite saturation densities (Ahuja et al. (2005), Oncogene 24:7729-7745).

[0472] d. Focus Formation

[0473] Unlike untransformed cells, transformed cells can proliferate on the surface of a growth arrested monolayer of untransformed cells. Cells can also contain an activated oncogene such as, for example, ras (Cavender et al. (1995), J. Virol. 69(2):923-934). In one example, cells can be mixed with an excess of untransformed cells and then maintained in culture dishes. Untransformed cells will growth arrest when reaching monolayer while transformed cells can form dense regions of multilayered cells, called foci, on the surface of the monolayer. In another embodiment, cells to be assayed can be plated on a preformed monolayer of normal cells (Ahuja et al., Oncogene 24:7729-7745 (2005)).

[0474] e. Overcoming Growth-Inhibition of Tumor Suppressors

[0475] Constructs can be assayed for transformation by detecting the ability of SV-T to overcome growth-inhibitory effects of tumor suppressors, such as, for example, Rb. (Beachy et al. (2002), J. Virol. 76(7):3145-3157; Hinds et al. (1992), Cell 70(6):993-1006). In some examples, the tumor suppressors can be overexpressed. For example, overexpression of Rb can cause cells to arrest growth and adopt morphological and biochemical properties of senescent cells (Beachy et al. (2002), J. Virol. 76(7):3145-3157). The cells stop dividing and adopt a large flat shape (Templeton et al. (1991), Proc. Natl. Acad. Sci. USA 88:3033-3037). In one example, Rb-deficient cells are transfected with a construct expressing Rb and a construct expressing wild-type or mutant SV-T. After incubation for minutes, hours, or days, the cultures are fixed and stained, and large flat cells counted.

[0476] f. Activation of Cyclin A

[0477] Cells can be assayed for transformation by examining the ability of SV-T to transactivate the cyclin A promoter, which is a requirement for cell cycle progression. Cells can be transfected with SV-T and a reporter under the control of a cyclin A promoter region. After transfection, cells can be assayed for luciferase activity.

[0478] g. Anchorage Independence

[0479] Cells can be assayed for transformation by observing growth and proliferation in the absence of contact with a culture vessel surface and components of serum that coat the surface. In culture, normal cells require contact to proliferate. In contrast, some transformed cells, such as SV40-transformed cells, proliferate in the absence of contact. In one exemplary assay, cells can be suspended in a slurry of agarose supplemented with medium and serum. Under these conditions, untransformed cells can remain viable for weeks but do not proliferate, while SV40-transformed cells proliferate and grow as multicellular spheres (Ahuja et al. (2005), Oncogene 24:7729-7745). In another example, since expression of wild-type SV-T will confer soft agar growth in a suitable recipient cell line, cell lines that do not clone in soft agar can be transfected with an oncovector nucleic acid or other vector containing the wild-type or mutant SV-T, and the cells phenotypically screened for the ability to grow in soft agar (see e.g., U.S. Pat. No. 6,339,065).

[0480] h. Formation of Tumors in Animals

[0481] Normal cells are nontumorigenic when injected into test animals such as immunocompromised mice. Cells transfected with an oncovector nucleic acid or other vector containing the wild-type or mutant SV-T can be screened for formation of tumors in test animals such as nude mice (see, e.g. U.S. Pat. No. 6,339,065; Ahuja et al. (2005), Oncogene 24:7729-7745).

[0482] i. Binding of SV-T to Tumor Suppressor Proteins

[0483] Binding assays can be used to identify SV-T mutants that do not bind tumor suppressor proteins. Modified SV-T binding and/or affinity for tumor suppressor proteins can be determined using assays well known in the art. Any binding assay known to one of skill in the art is contemplated. As one example, electrophoretic mobility-shift assays (EMSA) can be used to measure interaction between SV-T and tumor suppressor proteins. Furthermore, pull-down methods can be used to detect formation of a SV-T tumor suppressor protein complex. In one example, wild-type or mutant SV-T is expressed as a fusion with glutathione S-transferase GST. The SV-T/GST fusion is immobilized on glutathione resin, washed, and incubated with p53. The resin is washed again, and analyzed by electrophoresis to detect p53 (Dickmanns et al. (1994), J. Virol. 68(9):5496-5508). Western blot analysis and/or immunoprecipitation can also be used to detect binding of SV-T to tumor suppressor proteins, such as, for example p53. In one example, tumor suppressor proteins can be detected by radiolabeling or immunodetection with anti-p53 primary antibodies and a secondary antibody linked to a reporter (Kierstead et al. (1993), J. Virol. 67(4):1817-1829).

[0484] The crystal structure of SV-T in complex with p53 shows that SV-T occupies the p53 DNA-binding surface and likely interferes with formation of a functional p53 tetramer (Lilyestrom et al. (2006), Genes Dev. 20:2373-2382). Therefore, transformation assays can include measuring SV-T dependent inhibition of tumor suppressor protein binding to target sequence. For example, the effects of SV-T on p53 binding to target sequences such as, for example, the human ribosomal gene cluster RGC sequence, can be measured by immunobinding, methylation interference (Kern et al. (1991), Oncogene 6:131-136), EMSA, and DNase I footprinting reactions (Bargonetti et al. (1992), Genes & Dev. 6:1886-1898). Since disrupting SV-T binding to p53 can inhibit SV-T helicase function, assays can also be performed to determine the effect of SV-T mutations on replication.

[0485] 4. Expression Assays

[0486] Expression of genes contained within any of the constructs provided herein can be assessed by standard procedures known to one of skill in the art. Such assays are well known in the art and include, but are not limited to, enzyme-linked immunosorbent assays (ELISA), sodium dodecyl sulfate-polyacrylamide gel electrophoresis (SDS-PAGE) and detection of electrophoresed products by Western Blotting or coomassie blue staining, and other similar methods. In addition, expression can be assessed by assaying for the expression of a reporter gene, such as a fluorescent protein, e.g., GFP, or other detectable protein. The expression of the reporter gene can be correlated with expression as determined by any one or more other methods to assess expression. In performing such assays transfected cells can be lysed and cell lysates processed for analysis.

[0487] 5. Immunogenicity Assays

[0488] The constructs provided herein can be modified to optimize their immunostimulatory effect. For example, the constructs can be modified to reduce acute inflammatory responses activated by the innate immune system in response to foreign pathogens. The effects of construct modifications on immunogenicity can be assayed by any method known to one of skill in the art. For example, reporter genes can be used to detect activation of signal transducers for inflammatory stimuli, including nuclear factor κB (NF-κB), Jun N-terminal kinase (JNK) and p38 mitogen-activated protein kinase (MAPK).

[0489] One component of the innate immune system are toll-like receptors (TLRs), transmembrane receptor proteins encoded to recognize patterns of pathogen-derived ligands and activate cells via a conserved Toll/IL-1R signal pathway that leads to activation of NF-κB and other transcriptional regulators. Toll-like receptor 9 (TLR9) binds bacterial DNA due to a greater frequency of unmethylated CpG bases than in vertebrates (Bauer et al. (2001), Proc. Natl. Acad. Sci. USA 98(16):9237-9242); Medzhitov (2001), Nature Immunol. 2(1):15-16; Hemmi et al. (2000), Nature 408:740-745), resulting in activation of downstream mediators such as NF-κB, and activation of proinflammatory cytokine production.

[0490] As one example of the modifications to optimize immunostimulatory effects of the constructs provided herein, CpG motifs can be removed from coding regions by silent mutations, and removed from non-coding regions when there is no deleterious effect on function. The effects of CpG mutation on immunostimulatory effects of the constructs can be assayed by monitoring downstream mediators activated by TLR9. For example, cells can contain an NF-κB reporter, such as, for example, an NF-κB luciferase reporter. Luciferase activity can be monitored using a luminometer, and measurements can be qualitative or quantitative. Alternatively, as another example, production of cytokines, such as IL-8, can be monitored by any assay known to one of skill in the art, such as, for example ELISA, as an indication of immunostimulatory activation.

[0491] Control experiments can be used in assays that detect immunostimulatory activation induced by CpG motifs within constructs. For example, activation can be abrogated by blocking cellular uptake with synthetic oligonucleotides lacking CpG, or by Bafilomycin A, which blocks endosomal maturation (Yoshimori et al. (1991), J. Biol. Chem. 266:17707-17712). Furthermore, activation can also be abrogated by methylation of CpG motifs. For example, constructs can be methylated in vitro by incubation with SssI methylase prior to assay (Kroft et al. (2001), Biology of Reproduction 65:1522-1527). Any suitable cell type, such as, for example, 293 cells, can be used in the assay.

[0492] 6. Animal Models

[0493] Non-human animal models can be used to assess the activity of any of the constructs provided herein. For example, non-human animals can be used as models of a disease or condition. Exemplary animal models include animal models of cancer. In one example, animal models of cancer can be developed by injection of tumor cell lines into nude mice. Nude mice can be utilized in human cancer models because the human cells will not be rejected by the mice and will form solid tumors when the appropriate cells lines are used. For example, the osteosarcoma cell lines SAOS-2 (ATCC #HTB-85) and U-2OS (ATCC #HTB-96) can be used.

### G. PREPARATION, FORMULATION AND ADMINISTRATION OF ONCOVECTOR CONSTRUCTS AND ONCOVECTOR CONSTRUCT COMPOSITIONS

[0494] Oncovector constructs and oncovector construct compositions can be formulated for administration by any route known to those of skill in the art including intramuscular, intravenous, intradermal, intraperitoneal injection, subcutaneous, epidural, nasal, oral, rectal, topical, inhalational, buccal (e.g., sublingual), and transdermal administration or any route. Oncovector constructs can be administered by any convenient route, for example by infusion or bolus injection, by absorption through epithelial or mucocutaneous linings (e.g., oral mucosa, rectal and intestinal mucosa, etc.) and can be administered with other biologically active agents, either sequentially, intermittently or in the same composition. Administration can be local, topical or systemic depending upon the locus of treatment. Local administration to an area in need of treatment can be achieved by, for example, but not limited to, local infusion during surgery, topical application, e.g., in conjunction with a wound dressing after surgery, by injection, by means of a catheter, by means of a suppository, or by means of an implant. Administration also can include controlled release systems including controlled release formulations and device controlled release, such as by means of a pump. The most suitable route in any given case will depend on the nature and severity of the disease or condition being treated and on the nature of the particular composition which is used.

[0495] In some embodiments, i.e. those involving subcutaneous injection, oncovector constructs can be co-administered with interstitial delivery enhancing agents. These agents act by degrading components of the interstitial matrix to increase the dispersion and bioavailability of locally injected drugs. The interstitial matrix is a complex three-dimensional structure made of various structural macromolecules including collagens, elastin, and fibronectins. Glycosaminoglycans (i.e. hyaluronan) and proteoglycans form a hydrated gel-like substance in the interstitial matrix, which acts as a filter controlling the rate of drug flow. Glycosaminoglycanases such as for example, hyaluronidase enzyme (rHuPH20) degrade this interstitial matrix filter through depolymerization of the viscoelastic component (Bookbinder et al., J Controlled Release 114:230-241 (2006)). Thus, co-administration of an interstitial delivery enhancing agent such as a hyaluronidase, for example rHuPH20, can improve delivery of the oncovector constructs provided herein.

[0496] Various delivery systems are known and can be used to administer oncovector constructs, such that the constructs are taken up by cells and incorporated into the nucleus (see e.g., Patil et al., AAPS Journal 7(1):E61-E77 (2005)). These include, but are not limited to, receptor- and non-receptor-mediated endocytosis; encapsulation in liposomes (e.g., cationic liposomes, anionic liposomes, pH sensitive liposomes, immunoliposomes, pegylated stealth liposomes), polymeric micelles, lipoplexes, polyplexes, microparticles (e.g., stabilized plasmid-lipid particles), and microcapsules; microinjection; and particle bombardment (i.e. gene gun). Generally, oncovector constructs are delivered to the nuclear compartment of the cell where the various components of the construct described herein are expressed. Uptake of oncovector constructs into the nucleus can be enhanced by binding to nuclear localization signal peptides, transcription factors (e.g., GAL4, SV-40, and SMGA), histones, and by the use of peptide nucleic acid constructs and cationic delivery vectors (see e.g., Uherek, Adv Drug Deliv Rev 44:153-166 (2000); Kamiya et al., Adv Drug Deliv Rev 52:153-164 (2001); Jaaskelainen et al., Biochim Biophys Acta 1195:115-123 (1994); Jaaskelainen et al., Int J Pharm 167:191-203 (1998); Monnard et al., Biochim Biophys Acta 1329:39-50 (1997)).

[0497] Pharmaceutical compositions containing oncovector constructs can be prepared. Generally, pharmaceutically acceptable compositions are prepared in view of approvals for a regulatory agency or otherwise prepared in accordance with generally recognized pharmacopoeia for use in animals and in humans. Pharmaceutical compositions can include carriers such as a diluent, adjuvant, excipient, or vehicle with which an oncovector construct is administered. Such pharmaceutical carriers can be sterile liquids, such as water and oils, including those of petroleum, animal, vegetable or synthetic origin, such as peanut oil, soybean oil, mineral oil, and sesame oil. Water is a typical carrier when the pharmaceutical composition is administered intravenously. Saline solutions and aqueous dextrose and glycerol solutions also can be employed as liquid carriers, particularly for injectable solutions. Compositions can contain along with an active ingredient: a diluent such as lactose, sucrose, dicalcium phosphate, or carboxymethylcellulose; a lubricant, such as magnesium stearate, calcium stearate and talc; and a binder such as starch, natural gums, such as gum acacia gelatin, glucose, molasses, polyvinylpyrrolidine, celluloses and derivatives thereof, povidone, crospovidones and other such binders known to those of skill in the art. Suitable pharmaceutical excipients include starch, glucose, lactose, sucrose, gelatin, malt, rice, flour, chalk, silica gel, sodium stearate, glycerol monostearate, talc, sodium chloride, dried skim milk, glycerol, propylene, glycol, water, and ethanol. A composition, if desired, also can contain minor amounts of wetting or emulsifying agents, or pH buffering agents, for example, acetate, sodium citrate, cyclodextrin derivatives, sorbitan monolaurate, triethanolamine sodium acetate, triethanolamine oleate, and other such agents. These compositions can take the form of solutions, suspensions, emulsion, tablets, pills, capsules, powders, and sustained release formulations. A composition can be formulated as a suppository, with traditional binders and carriers such as triglycerides. Oral formulation can include standard carriers such as pharmaceutical grades of mannitol, lactose, starch, magnesium stearate, sodium saccharine, cellulose, magnesium carbonate, and other such agents. Examples of suitable pharmaceutical carriers are described in “Remington's Pharmaceutical Sciences” by E. W. Martin. Such compositions will contain a therapeutically effective amount of the compound, generally in purified form, together with a suitable amount of carrier so as to provide the form for proper administration to the patient. The formulation should suit the mode of administration.

[0498] Formulations are provided for administration to humans and animals in unit dosage forms, such as tablets, capsules, pills, powders, granules, sterile parenteral solutions or suspensions, and oral solutions or suspensions, and oil:water emulsions containing suitable quantities of the compounds or pharmaceutically acceptable derivatives thereof. Pharmaceutically therapeutically active compounds and derivatives thereof are typically formulated and administered in unit dosage forms or multiple dosage forms. Unit dose forms as used herein refer to physically discrete units suitable for human and animal subjects and packaged individually as is known in the art. Each unit dose contains a predetermined quantity of a therapeutically active compound sufficient to produce the desired therapeutic effect, in association with the required pharmaceutical carrier, vehicle or diluent. Examples of unit dose forms include ampoules and syringes and individually packaged tablets or capsules. Unit dose forms can be administered in fractions or multiples thereof. A multiple dose form is a plurality of identical unit dosage forms packaged in a single container to be administered in segregated unit dose form. Examples of multiple dose forms include vials, bottles of tablets or capsules or bottles of pints or gallons. Hence, multiple dose form is a multiple of unit doses that are not segregated in packaging.

[0499] Dosage forms or compositions containing active ingredient in the range of 0.005% to 100% with the balance made up from non toxic carrier can be prepared. For oral administration, pharmaceutical compositions can take the form of, for example, tablets or capsules prepared by conventional means with pharmaceutically acceptable excipients such as binding agents (e.g., pregelatinized maize starch, polyvinyl pyrrolidone or hydroxypropyl methylcellulose); fillers (e.g., lactose, microcrystalline cellulose or calcium hydrogen phosphate); lubricants (e.g., magnesium stearate, talc or silica); disintegrants (e.g., potato starch or sodium starch glycolate); or wetting agents (e.g., sodium lauryl sulphate). The tablets can be coated by methods well-known in the art.

[0500] Pharmaceutical preparation also can be in liquid form, for example, solutions, syrups or suspensions, or can be presented as a drug product for reconstitution with water or other suitable vehicle before use. Such liquid preparations can be prepared by conventional means with pharmaceutically acceptable additives such as suspending agents (e.g., sorbitol syrup, cellulose derivatives or hydrogenated edible fats); emulsifying agents (e.g., lecithin or acacia); non-aqueous vehicles (e.g., almond oil, oily esters, or fractionated vegetable oils); and preservatives (e.g., methyl or propyl-p-hydroxybenzoates or sorbic acid).

[0501] Formulations suitable for rectal administration can be provided as unit dose suppositories. These can be prepared by admixing the active compound with one or more conventional solid carriers, for example, cocoa butter, and then shaping the resulting mixture.

[0502] Formulations suitable for topical application to the skin or to the eye include ointments, creams, lotions, pastes, gels, sprays, aerosols and oils. Exemplary carriers include vaseline, lanoline, polyethylene glycols, alcohols, and combinations of two or more thereof. The topical formulations also can contain 0.05 to 15, 20, 25 percent by weight of thickeners selected from among hydroxypropyl methyl cellulose, methyl cellulose, polyvinylpyrrolidone, polyvinyl alcohol, poly(alkylene glycols), polyhydroxyalkyl, (meth)acrylates or poly(meth)acrylamides. A topical formulation is often applied by instillation or as an ointment into the conjunctival sac. It also can be used for irrigation or lubrication of the eye, facial sinuses, and external auditory meatus. It also can be injected into the anterior eye chamber and other places. A topical formulation in the liquid state also can be present in a hydrophilic three-dimensional polymer matrix in the form of a strip or contact lens, from which the active components are released.

[0503] For administration by inhalation, the compounds for use herein can be delivered in the form of an aerosol spray presentation from pressurized packs or a nebulizer, with the use of a suitable propellant, e.g., dichlorodifluoromethane, trichlorofluoromethane, dichlorotetrafluoroethane, carbon dioxide or other suitable gas. In the case of a pressurized aerosol, the dosage unit can be determined by providing a valve to deliver a metered amount. Capsules and cartridges of, e.g., gelatin, for use in an inhaler or insufflator can be formulated containing a powder mix of the compound and a suitable powder base such as lactose or starch.

[0504] Formulations suitable for buccal (sublingual) administration include, for example, lozenges containing the active compound in a flavored base, usually sucrose and acacia or tragacanth; and pastilles containing the compound in an inert base such as gelatin and glycerin or sucrose and acacia.

[0505] Pharmaceutical compositions of oncovector constructs can be formulated for parenteral administration by injection, e.g., by bolus injection or continuous infusion. Formulations for injection can be presented in unit dosage form, e.g., in ampules or in multi-dose containers, with an added preservative. The compositions can be suspensions, solutions or emulsions in oily or aqueous vehicles, and can contain formulatory agents such as suspending, stabilizing and/or dispersing agents. Alternatively, the active ingredient can be in powder form for reconstitution with a suitable vehicle, e.g., sterile pyrogen-free water or other solvents, before use.

[0506] Formulations of oncovector constructs suitable for transdermal administration can be presented as discrete patches adapted to remain in intimate contact with the epidermis of the recipient for a prolonged period of time. Such patches suitably contain the active compound as an optionally buffered aqueous solution of, for example, 0.1 to 0.2 M concentration with respect to the active compound. Formulations suitable for transdermal administration also can be delivered by iontophoresis (see, e.g., Pharmaceutical Research 3(6), 318 (1986)) and typically take the form of an optionally buffered aqueous solution of the active compound.

[0507] Pharmaceutical compositions also can be administered by controlled release means and/or delivery devices (see, e.g., in U.S. Pat. Nos. 3,536,809; 3,598,123; 3,630,200; 3,845,770; 3,847,770; 3,916,899; 4,008,719; 4,687,610; 4,769,027; 5,059,595; 5,073,543; 5,120,548; 5,354,566; 5,591,767; 5,639,476; 5,674,533 and 5,733,566).

[0508] In certain embodiments, liposomes also can be employed with oncovector construct administration. Liposomes are formed from phospholipids that are dispersed in an aqueous medium and spontaneously form multilamellar concentric bilayer vesicles (also termed multilamellar vesicles (MLVs). MLVs generally have diameters of from 25 nm to 4 μm. Sonication of MLVs results in the formation of small unilamellar vesicles (SUVs) with diameters in the range of 200 to 500 Å, containing an aqueous solution in the core.

[0509] Phospholipids can form a variety of structures other than liposomes when dispersed in water, depending on the molar ratio of lipid to water. At low ratios, the liposomes form. Physical characteristics of liposomes depend on pH, ionic strength and the presence of divalent cations. Liposomes can show low permeability to ionic and polar substances, but at elevated temperatures undergo a phase transition which markedly alters their permeability. The phase transition involves a change from a closely packed, ordered structure, known as the gel state, to a loosely packed, less-ordered structure, known as the fluid state. This occurs at a characteristic phase-transition temperature and results in an increase in permeability to ions, sugars and drugs.

[0510] Liposomes interact with cells via different mechanisms: endocytosis by phagocytic cells of the reticuloendothelial system such as macrophages and neutrophils; adsorption to the cell surface, either by nonspecific weak hydrophobic or electrostatic forces, or by specific interactions with cell-surface components; fusion with the plasma cell membrane by insertion of the lipid bilayer of the liposome into the plasma membrane, with simultaneous release of liposomal contents into the cytoplasm; and by transfer of liposomal lipids to cellular or subcellular membranes, or vice versa, without any association of the liposome contents. Varying the liposome formulation can alter which mechanism is operative, although more than one can operate at the same time.

[0511] For oncovector construct delivery methods that involve exposure to the endosomal compartment of the cell, administration methods can be employed to decrease the exposure of oncovector constructs to degradative processes within the endosome and facilitate delivery to the cellular cytoplasm. These methods include use of agents that promote rapid release from the endosomal compartment and/or disrupt the endosomal membrane. Such agents include, but are not limited to, fusogenic lipids (i.e. 1,2-dioleoyl-sn-glycero-3-phosphoethanolamine (DOPE)); lysosomatotropic agents such as monensin and chloroquine; viral peptides such as hemagglutinin HA2; fusogenic peptides such as poly(L-lysine) (PLL); and cationic polymers such as polyethyleneimine (PEI) and dendrimers (see e.g., Akhtar and Juliano, Trends Cell Bio 2:139-144 (1992); Wu-Pong, Adv Drug Deliv Rev 44:59-70 (2000); Kamiya et al., Adv Drug Deliv Rev 52:153-164 (2001); Brown et al., Int J Pharm 229:1-21 (2001); Luo and Saltzman, Nat Biotechnol 18:33-37 (2000); Kunisawa et al., Adv Drug Deliv Rev 52:177-186 (2001); Hope et al., Mol Membr Biol 15:1-14 (1998)).

[0512] Additional methods can be employed to decrease the exposure of oncovector constructs to degradative processes, such as exposure to nucleases and immunological intervention via antigenic and immunogenic responses. Examples of such methods include assembly of the oncovector construct as a stable plasmid, as described herein. Oncovector constructs also can be modified to modulate serum stability and half-life as well as reduce immunogenicity. Such modifications can be effected by any means known in the art and include modification of the primary DNA sequence such as, for example, removal or reduction of CpG motifs, or methylation of CpG motifs, as described herein.

[0513] Desirable blood levels can be maintained by a continuous infusion of the active agent as ascertained by plasma levels. It should be noted that the attending physician would know how to and when to terminate, interrupt or adjust therapy to lower dosage due to toxicity, or bone marrow, liver or kidney dysfunctions. Conversely, the attending physician would also know how to and when to adjust treatment to higher levels if the clinical response is not adequate (precluding toxic side effects), administered, for example, by oral, pulmonary, parental (intramuscular, intraperitoneal, intravenous (IV) or subcutaneous injection), inhalation (via a fine powder formulation), transdermal, nasal, vaginal, rectal, or sublingual routes of administration and can be formulated in dosage forms appropriate for each route of administration (see, e.g., International PCT application Nos. WO 93/25221 and WO 94/17784; and European Patent Application 613,683).

[0514] An oncovector construct is included in the pharmaceutically acceptable carrier in an amount sufficient to exert a therapeutically useful effect in the absence of undesirable side effects on the patient treated. Therapeutically effective concentration can be determined empirically by testing the compounds in known in vitro and in vivo systems, such as the assays provided herein.

[0515] The concentration of an oncovector construct in the composition will depend on absorption, inactivation and excretion rates of the complex, the physicochemical characteristics of the complex, the dosage schedule, and amount administered as well as other factors known to those of skill in the art.

[0516] The amount of an oncovector construct to be administered for the treatment of a disease or condition, such as for example, cancer, can be determined by standard clinical techniques. In addition, in vitro assays and animal models can be employed to help identify optimal dosage ranges. The precise dosage, which can be determined empirically, can depend on the route of administration and the seriousness of the disease.

[0517] An oncovector construct can be administered at once, or can be divided into a number of smaller doses to be administered at intervals of time. Oncovector constructs can be administered in one or more doses over the course of a treatment time for example over several hours, days, weeks, or months. In some cases, continuous administration is useful. It is understood that the precise dosage and duration of treatment is a function of the disease being treated and can be determined empirically using known testing protocols or by extrapolation from in vivo or in vitro test data. It is to be noted that concentrations and dosage values also can vary with the severity of the condition to be alleviated. It is to be further understood that for any particular subject, specific dosage regimens should be adjusted over time according to the individual need and the professional judgment of the person administering or supervising the administration of the compositions, and that the concentration ranges set forth herein are exemplary only and are not intended to limit the scope or use of compositions and combinations containing them.

[0518] Exemplary Delivery Methods

[0519] The oncovector constructs provided herein can be administered as naked DNA, or within delivery vehicles. Hence, the nucleic acid molecule constructs provided herein can be packaged and delivered using any drug delivery system known to one of skill in the art. In particular, the delivery system is one that is capable of efficient delivery directed to tumor cells. For example, the nucleic acid molecules are delivered systemically. In some examples, the oncovector construct also can be administered in the presence of a hyaluronidase, such as PH20.

[0520] Drug delivery systems can include particulate carriers, such as those composed primarily of lipids and/or polymers. Such drug delivery systems can alter the pharmacokinetics and the biodistribution of their associated drug or to function as a reservoir. For example, a drug delivery system that includes a particulate carrier can ameliorate problems of poor solubility, can prevent rapid breakdown of the drug in vivo (e.g. digestion of plasmid by DNAses), reduce rapid clearance by the liver and enhance the selectivity of the drug for its target tissue.

[0521] Exemplary of drug delivery systems for delivery of the nucleic acid molecules provided herein are plasmid/nanoparticle complex that can include polyethylenimine (PEI) polymers (Genesee Scientific), polypropylenimine dendrimers PPIG3 polymers, B-amino-ester polymers, liposome formulations (Invitrogen) or sugar molecules such as cyclodextrin polymers.

[0522] In particular examples, the plasmid/nanoparticle complex can be delivered to the tumor site through a mechanism known as the enhanced permeability and retention effect (EPR), sometimes called passive targeting. In certain pathological conditions, such as in inflamed tissues and solid tumors, the permeability of the tissue vasculature increases to the point that particulate carriers, which are normally excluded from tissues, can extravasate and localize in the tissue intrastitial space. In contrast to tight blood vessels in most normal tissues, angiogenic blood vessels as they occur in tumors have gaps as large as 600 to 800 nm between adjacent endothelial cells. Carriers can extravasate through these gaps into the tumor interstitial space, in a size-dependent manner. As tumors have impaired lymphatic drainage, the carriers concentrate in the tumor, and large increases in tumor drug concentrations (10-fold, or more, higher) can be achieved relative to administration of the same dose of free drug.

[0523] In some examples, the constructs can be conjugated to a targeting protein to enhance targeting to tumor cells. For example, active targeting to the tumor cells can achieve significant increased vector expression at the tumor site. Exemplary of a targeting protein is transferrin. The transferrin receptor is found overexpressed in at least 40% of human tumors and cell lines and thus can provide a suitable receptor for targeted delivery of transferrin-linked DNA/nanoparticle complexes.

### H. EXEMPLARY METHODS OF TREATMENT

[0524] The oncovector constructs provided herein can be used for treatment of any disease or condition for which a particular oncovector construct is designed. Typically, such treatments include those where selective cell death, i.e. via cell fusion resulting in apoptosis, is desired. The oncovector constructs provided herein are designed to self replicate and promote fusogenic activity in a target cell population. Oncovector constructs have therapeutic activity alone or in combination with other agents. This section provides exemplary therapeutic uses of oncovector constructs. These described therapies are exemplary and do not limit the applications of oncovector constructs.

[0525] The oncovector constructs provided herein can be rationally designed by one of skill in the art to treat any disease or condition where selective cell death in a population of cells is desired. For example, an oncovector construct can be designed to target a particular cell population by inclusion of a cell type specific promoter. Such oncovector constructs would be active in cell types with particular transcriptional regulator expression profiles. In particular, the absence or presence of transcriptional activators and/or repressors in a particular cell type can determine whether an oncovector construct containing a particular promoter will be active in that cell. Thus, one of skill in the art can select a promoter for the oncovector construct based on the transcriptional regulator profiles of potential target cell populations known to be active in a particular disease. In some embodiments, the etiology of the disease is characterized by an aberrant transcriptional regulation profile, which facilitates the selective activity of the oncovector construct designed to treat that disease.

[0526] Oncovector constructs provided herein are intended for use in therapeutic methods in which selective cell death is desired. Such methods include, but are not limited to, methods of treatment of diseases, disorders and conditions, such as, but not limited to, inflammatory disorders; neurodegenerative disorders; heart disease; angiogenesis-mediated disease; and cancers such as leukemias (e.g., lymphoblastic, myeloid, hairy cell), lymphomas (e.g., AIDS-related, Burkitt, cutaneous T-cell, Hodgkin, non-Hodgkin, primary central nervous system (CNS)), carcinomas (e.g., adrenocortical, basal cell, islet cell, Merkel cell, squamous cell), astrocytomas (e.g., cerebellar, cerebral), gastrointestinal tumors (e.g., carcinoid, stromal), germ cell tumors (e.g., extracranial, extragonadal, ovarian), Kaposi sarcoma, osteosarcoma, malignant fibrous histiocytoma, brain stem glioma, malignant glioma, ependymoma, medulloblastoma, Dermatofibrosarcoma protuberans, supratentorial primitive neuroectodermal tumors, visual pathway and hypothalamic glioma, bronchial adenomas, carcinoid tumors, chronic myeloproliferative disorders, colorectal cancers, retinoblastoma, intraocular melanoma, Ewing family of tumors, gestational trophoblastic tumor, gliomas, macroglobulinemia, melanoma, mesothelioma, metastatic squamous neck cancer, multiple endocrine neoplasia syndrome, multiple myeloma, mycosis fungoides, myelodysplastic syndromes, myeloproliferative diseases, neuroblastoma, pheochromocytoma, pineoblastoma, plasma cell neoplasm, pleuropulmonary blastoma, rhabdomyosarcoma, soft tissue sarcomas, uterine sarcoma, Sézary syndrome, Waldenström macroglobulinemia, Wilms tumor, and cancers of the anus, appendix, bile duct, bladder, bone, brain, breast, cervix, colon, endometrium, esophagus, eye, gallbladder, stomach, head and neck, liver, pharynx, pancreas, kidney, larynx, lung, lip and oral cavity, mouth, nasal cavity and paranasal sinus, ovary, pancreas, parathyroid, penis, pituitary, prostate, rectum, renal pelvis and ureter, salivary gland, skin, small intestine, testicles, throat, thymus, thyroid, urethra, uterus, vagina, vulva and hematological system.

[0527] The following are some exemplary conditions for which oncovector constructs or nanoparticles thereof can be used as a treatment agent alone or in combination with other agents.

[0528] 1. Cancers

[0529] The oncovector constructs provided herein can be used to treat various forms of cancer. Oncovector constructs can be designed to target cancer cell populations characterized by particular transcriptional regulation profiles. In some embodiments, the cancer cells to be treated can be characterized by lack of or reduced expression of tumor suppressor genes such as, for example, p53 and retinoblastoma (Rb). Cancer cells characterized by loss of p53 or Rb expression can be treated, for example, with oncovector constructs containing a promoter that is normally repressed by p53 and/or Rb. In some embodiments, the promoter is E2F. Exemplary cancers that can be treated with an oncovector construct containing the E2F promoter include, but are not limited to, sarcomas, mesothelioma, carcinoids, melanoma, neuroblastoma, retinoblastoma, osteosarcoma, and cancers of the lung, colon, esophagus, ovary, pancreas, skin, stomach, head and neck, bladder, prostate, liver, brain, adrenal gland, breast, endometrium, kidney, thyroid, parathyroid, cervix, bone, eye and hematological system. A subset of these exemplary cancers is discussed below.

[0530] a) Lung Cancer

[0531] Lung cancer, also known as carcinoma of the lung, is a disease where epithelial tissue in the lung grows uncontrollably. This leads to metastasis, invasion of adjacent tissue and infiltration beyond the lungs. The main types of lung cancer are small cell lung carcinoma and non-small cell lung carcinoma, which are discussed below. Typically, lung cancer is initiated by activation of oncogenes or inactivation of tumor suppressor genes. The oncovector constructs provided herein can be used to treat forms of lung cancer. The oncovector constructs can be used as a treatment agent alone or in combination with other forms of treatment.

[0532] i) Non-Small Cell Lung Carcinoma (NSCLC)

[0533] There are three main sub-types of non-small lung carcinomas: squamous cell lung carcinoma, adenocarcinoma and large cell lung carcinoma. Squamous cell lung carcinoma usually starts near a central bronchus and is often characterized by cavitation and necrosis within the center of the cancer. Well-differentiated squamous cell lung cancers often grow more slowly than other cancer types. Adenocarcinoma usually originates in peripheral lung tissue. Most cases of adenocarcinoma are associated with smoking. However, among non-smokers, adenocarcinoma is the most common form of lung cancer. A subtype of adenocarcinoma, the bronchioloalveolar carcinoma, is more common in female non-smokers. Large cell lung carcinoma is a fast-growing form that grows near the surface of the lung. It is often poorly differentiated and tends to metastasize early.

[0534] ii) Small Cell Lung Carcinoma (SCLC)

[0535] Small cell lung carcinoma is less common than non-small lung carcinoma. SCLC tends to arise in the larger breathing tubes and grows rapidly, becoming quite large. The SCLC cell contains dense neurosecretory granules which give this an endocrine/paraneoplastic syndrome association. While initially more sensitive to chemotherapy, SCLC ultimately carries a worse prognosis and is often metastatic at presentation. This type of lung cancer is strongly associated with smoking.

[0536] iii) Pathophysiology

[0537] Similar to other cancers described herein, lung cancer is initiated by activation of oncogenes or inactivation of tumor suppressor genes. Mutations in the Rb gene which lead to loss of Rb function have been identified in small cell lung carcinomas (Nevins, Human Molecular Genetics 10(7):699-703 (2001)). Mutations in the K-ras proto-oncogene are responsible for 20-30% of non-small cell lung cancers. Chromosomal damage can lead to loss of heterozygosity. This can cause inactivation of tumor suppressor genes. Damage to chromosomes 3p, 5q, 13q and 17p are particularly common in small cell lung carcinoma. The p53 tumor suppressor gene, located on chromosome 17p, is often affected.

[0538] Several genetic polymorphisms are associated with lung cancer. These include polymorphisms in genes coding for interleukin-1, cytochrome P450, apoptosis promoters such as caspase-8, and DNA repair molecules such as XRCC1. People with these polymorphisms are more likely to develop lung cancer after exposure to carcinogens.

[0539] iv) Treatment

[0540] The oncovector constructs provided herein can be used to treat forms of lung cancer described above. The oncovector constructs can be used as a treatment agent alone or in combination with other forms of treatment including, but not limited to, targeted therapy, chemotherapy, radiotherapy, and surgery. Forms of targeted therapy for lung cancer include, but are not limited to Gefitinib (Iressa), which targets the tyrosine kinase domain of the epidermal growth factor receptor (EGF-R); Erlotinib (Tarceva), another tyrosine kinase inhibitor; the angiogenesis inhibitor bevacizumab; cyclo-oxygenase-2 inhibitors; the apoptosis promoter exisulind; proteasome inhibitors; bexarotene; and vaccines. Chemotherapeutic agents often used in the treatment of lung cancer include, but are not limited to, cisplatin, carboplatin, gemcitabine, paclitaxel, docetaxel, etoposide, vinorelbine, topotecan and irinotecan. Radiotherapy methods for lung cancer include, but are not limited to, chest radiation, prophylactic cranial irradiation (PCI), and radiofrequency ablation.

[0541] b) Colorectal Cancer

[0542] Colorectal cancer, also known as colon cancer or bowel cancer, includes cancerous growths in the colon, rectum and appendix. It is the third most common form of cancer and the second leading cause of cancer-related death in the Western world. Many colorectal cancers are thought to arise from adenomatous polyps in the colon. These mushroom-like growths are usually benign, but some may develop into cancer over time. The most common colon cancer cell type is adenocarcinoma. Other, rarer types include lymphoma and squamous cell carcinoma. Typically, colorectal cancer is caused by mutations in DNA replication or DNA repair genes. The oncovector constructs provided herein can be used to treat colorectal cancer. The oncovector constructs can be used as a treatment agent alone or in combination with other forms of treatment.

[0543] i) Pathophysiology

[0544] Colorectal cancer is a disease originating from the epithelial cells lining the gastrointestinal tract. Hereditary or somatic mutations in DNA replication or DNA repair genes, including APC, K-Ras, NOD2 and p53 genes, can lead to unrestricted cell division. Chronic inflammation, such as in inflammatory bowel disease, can predispose patients to malignancy.

[0545] ii) Treatment

[0546] The oncovector constructs provided herein can be used to treat colorectal cancer. The oncovector constructs can be used as a treatment agent alone or in combination with other forms of treatment including, but not limited to, chemotherapy, radiotherapy, immunotherapy (i.e. Bacille Calmette-Guérin (BCG)), vaccine and surgery. Chemotherapeutic agents for the treatment of colorectal cancer can include, but are not limited to, 5-fluorouracil (5-FU), Capecitabine (Xeloda®), Leucovorin (LV, Folinic Acid), Oxaliplatin (Eloxatin®), Irinotecan (Camptosar®), Bevacizumab (Avastin®), Cetuximab (Erbitux®), Panitumumab (Vectibix), Bortezomib (Velcade®), Oblimersen (Genasense®, G3139), Gefitinib and Erlotinib (Tarceva®), and Topotecan (Hycamtin®).

[0547] c) Bladder Cancer

[0548] Bladder cancer refers to any of several types of malignant growths of the urinary bladder. Bladder cancer is characterized by the uncontrolled division of abnormal cells in the bladder. The bladder, located in the pelvis, is a hollow, muscular organ that stores urine. The most common type of bladder cancer begins in cells lining the inside of the bladder and is called urothelial cell or transitional cell carcinoma (UCC or TCC). Other types of bladder cancer include tumors arising from squamous cell carcinoma, adenocarcinoma, sarcoma, small cell carcinoma and secondary deposits from cancers elsewhere in the body. Bladder cancer development is often characterized by mutations in various oncogenes and tumor suppressor genes. The oncovector constructs provided herein can be used to treat bladder cancer. The oncovector constructs can be used as a treatment agent alone or in combination with other forms of treatment.

[0549] i) Pathophysiology

[0550] Bladder cancer development typically involves the acquisition of mutations in various oncogenes and tumor suppressor genes. Genes which tend to be altered in bladder cancer include FGFR3, HRAS, Rb and p53. A family history of bladder cancer also is a risk factor for the disease. In some cases, people appear to inherit reduced ability to break down certain chemicals, which makes them more sensitive to carcinogens.

[0551] ii) Treatment

[0552] The oncovector constructs provided herein can be used to treat bladder cancer. The oncovector constructs can be used as a treatment agent alone or in combination with other forms of treatment including, but not limited to, chemotherapy, radiotherapy, immunotherapy (i.e. Bacille Calmette-Guérin (BCG)), and surgery.

[0553] d) Ovarian Cancer

[0554] Ovarian cancer is a malignant tumor on or within an ovary. Ovarian cancer is classified according to the histology of the tumor, obtained in a pathology report. Surface epithelial-stromal tumor, including serous and mucinous cystadenocarcinoma, is the most common type of ovarian cancer. Other forms of ovarian cancer include sex cord-stromal tumor (i.e. estrogen-producing granulosa cell tumor and virilizing Sertoli-Leydig or arrhenoblastoma), and germ cell tumor. Genetic factors often play a role in the development of ovarian cancer. The oncovector constructs provided herein can be used to treat ovarian cancer. The oncovector constructs can be used as a treatment agent alone or in combination with other forms of treatment.

[0555] i) Pathophysiology

[0556] In many cases, genetic factors play a role in the development of ovarian cancer. Carriers of certain mutations of the BRCA1 or the BRCA2 gene are at a higher risk of developing both breast cancer and ovarian cancer. Mutations in the tumor suppressor gene p53 also have been observed in ovarian tumors (Greenblatt et al., Cancer Research 54:4855-4878 (1994)).

[0557] ii) Treatment

[0558] The oncovector constructs provided herein can be used to treat ovarian cancer. The oncovector constructs can be used as a treatment agent alone or in combination with other forms of treatment including, but not limited to, chemotherapy and surgery.

[0559] e) Skin Cancer

[0560] Skin cancer is a malignant growth on the skin and generally develops in the epidermis. The most common types of skin cancer are basal cell carcinoma (BCC) and squamous cell carcinoma (SCC) which can be locally disfiguring but are unlikely to metastasize. The most dangerous type of skin cancer is malignant melanoma. This form of skin cancer can be fatal if not treated early but contain only a small proportion of all skin cancers. More rare types of skin cancer include Dermatofibrosarcoma protuberans, Merkel cell carcinoma, and Kaposi's sarcoma. The oncovector constructs provided herein can be used to treat skin cancer. The oncovector constructs can be used as a treatment agent alone or in combination with other forms of treatment including, but not limited to, chemotherapy, surgery, radiotherapy, and cryotherapy.

[0561] f) Prostate Cancer

[0562] Prostate cancer occurs when cells of the prostate, a male reproductive organ which helps make and store seminal fluid, mutate and begin to multiply uncontrollably. These cells can spread from the prostate to other parts of the body, including the bones and lymph nodes. Prostate cancer can cause pain, difficulty in urinating, erectile dysfunction and other symptoms. Many factors, including genetics and diet, have been implicated in the development of prostate cancer. The oncovector constructs provided herein can be used to treat prostate cancer. The oncovector constructs can be used as a treatment agent alone or in combination with other forms of treatment.

[0563] i) Pathophysiology

[0564] A man's genetic profile contributes to his risk of developing prostate cancer. For example, BRCA1 and BRCA2 genes that are known risk factors for ovarian cancer and breast cancer in women also have been implicated in prostate cancer. Other genes which tend to be altered in prostate cancer include Rb and p53 (Banerjee et al., Cancer Research 52:6297-6304 (1992); Greenblatt et al., Cancer Research 54:4855-4878 (1994)).

[0565] ii) Treatment

[0566] The oncovector constructs provided herein can be used to treat prostate cancer. The oncovector constructs can be used as a treatment agent alone or in combination with other forms of treatment including, but not limited to, surgery, radiation therapy, hormonal therapy, chemotherapy, cryosurgery, and high intensity focused ultrasound (HIFU). Radiotherapy techniques include, but are not limited to, external beam radiation therapy, tomotherapy, and permanent implant brachytherapy. Hormonal therapies (i.e. medications or surgery to prevent prostate cancer cells from receiving dihydrotestosterone (DHT)) include, but are not limited to, orchiectomy (a surgery to remove the testicles); antiandrogens such as flutamide, bicalutamide, nilutamide, and cyproterone acetate which directly block the actions of testosterone and DHT within prostate cancer cells; ketoconazole and aminoglutethimide, which block the production of adrenal androgens such as DHEA; Abarelix (a GnRH antagonist); and leuprolide, goserelin, triptorelin, and buserelin (GnRH agonists).

[0567] g) Breast Cancer

[0568] Breast cancer is a cancer of the glandular breast tissue. Breast cancer can be divided into groups based on the tissue of origin, e.g. epithelial (carcinoma) versus stromal (sarcoma). The majority of breast cancers are carcinomas, which can be divided further into subclassifications such as ductal carcinoma (DCIS), lobular carcinoma (LCIS), papillary carcinoma, tubular/cribriform carcinoma, mucinous carcinoma, medullary carcinoma, and metaplastic carcinoma. In some cases, breast cancer is caused by a combination of environmental and hereditary factors. However, in most cases of breast cancer, the cause is unknown. The oncovector constructs provided herein can be used to treat breast cancer. The oncovector constructs can be used as a treatment agent alone or in combination with other forms of treatment.

[0569] i) Pathophysiology

[0570] In some breast cancer cases, there is a strong inherited familial risk. Two autosomal dominant genes, BRCA1 and BRCA2, account for most of the cases of familial breast cancer. Other genes which tend to be altered in breast cancer include Rb and p53 (Nevins, Human Molecular Genetics 10(7):699-703 (2001); Greenblatt et al., Cancer Research 54:4855-4878 (1994)). Other risk factors include age, diet, alcohol and tobacco use, obesity, hormones, and various environmental factors.

[0571] ii) Treatment

[0572] The oncovector constructs provided herein can be used to treat breast cancer. The oncovector constructs can be used as a treatment agent alone or in combination with other forms of treatment including, but not limited to, surgery (i.e. lumpectomy or mastectomy), hormonal therapy, chemotherapy, radiotherapy and targeted therapy. Hormonal therapies include, but are not limited to, tamoxifen, aromatase inhibitors, GnRH analogs, and ovarian ablation/suppression. Chemotherapeutic agents include, but are not limited to, cyclophosphamide, methotrexate, 5-fluorouracil, Adriamycin (doxorubicin), paclitaxel, Taxotere (docetaxel), and epirubicin. Radiotherapy techniques include, but are not limited to, IMRT (intensity modulated radiation therapy), brachytherapy (i.e. Mammosite), and targeted intraoperative radiotherapy (TARGIT). Targeted therapies include, but are not limited to, trastuzumab (Herceptin®), which is a monoclonal antibody that blocks the activity of the HER2 protein; and bevacizumab, which is a monoclonal antibody that blocks the activation of the VEGF receptor.

[0573] 2. Selection of the Components of an Oncovector Construct for Treatment

[0574] Determination of the components of an oncovector construct is a consideration when determining which oncovector construct molecule to use in treating a selected disease. Several factors can be empirically determined to rationally design an oncovector construct for the treatment of a disease or disorder. First, the disease to be treated should be identified. Typically, such a disease is one which exhibits a unique transcriptional regulation profile in a population of cells that contribute to the etiology of the disease. Second, one or more promoters that is active under such transcriptional regulation can be identified. Such promoters would preferentially drive expression of the oncovector construct in disease cells, and likewise, would be inactive in normal or healthy cells. One of skill in the art knows or could identify transcriptional regulators that are involved in or characteristic of the etiology of the selected diseases. For example, the contribution of oncogenes and tumor repressors to some exemplary cancers are described above. One of skill in the art could then determine the appropriate promoter that would function as desired under the cell-specific transcriptional profile. The resultant oncovector construct is then a candidate therapeutic for treating the selected disease.

[0575] For example, loss of tumor suppressors such as Rb and p53, often triggers the onset of variety of cancers, including but not limited to, the exemplary cancers described above. Thus, an oncovector construct can be designed, that has as a component a promoter that is active in the absence of Rb and/or p53, to selectively target tumor cells as a mechanism of treating cancer. Exemplary of such a promoter is the E2F promoter, which is suppressed by Rb and p53 in normal cells and activated in cancer cells. Thus, a candidate oncovector construct for the treatment of a variety of cancers would be one that is driven by the E2F promoter.

[0576] 3. Combination Therapies

[0577] Oncovector constructs can be used in combination with each other and with other existing drugs and therapeutics to treat diseases and conditions. For example, as described herein oncovector constructs can be used to treat diseases, such as cancer, and/or control tumor proliferation. Such treatments can be performed in conjunction with anti-tumorigenic drugs and/or therapeutics. Examples of antitumorigenic drugs and therapies useful for combination therapies include tyrosine kinase inhibitors and molecules capable of modulating tyrosine kinase signal transduction including, but not limited to, 4-aminopyrrolo[2,3-d]pyrimidines (see for example, U.S. Pat. No. 5,639,757), and quinazoline compounds and compositions (e.g., U.S. Pat. No. 5,792,771). Other compounds useful in combination therapies include steroids such as the angiostatic 4,9(11)-steroids and C21-oxygenated steroids, angiostatin, endostatin, vasculostatin, canstatin and maspin, angiopoietins, bacterial polysaccharide CM101 and the antibody LM609 (U.S. Pat. No. 5,753,230), thrombospondin (TSP-1), platelet factor 4 (PF4), interferons, metalloproteinase inhibitors, pharmacological agents including AGM-1470/TNP-470, thalidomide, and carboxyamidotriazole (CAI), cortisone such as in the presence of heparin or heparin fragments, anti-Invasive Factor, retinoic acids and paclitaxel (U.S. Pat. No. 5,716,981), shark cartilage extract, anionic polyamide or polyurea oligomers, oxindole derivatives, estradiol derivatives and thiazolopyrimidine derivatives.

[0578] Treatment of cancers can include combination therapy with anti-cancer agents such as antibodies, small molecule tyrosine kinase inhibitors, antisense oligonucleotides, vaccines, or immunoconjugates (i.e. antibodies coupled to radioactive isotope or cytotoxin). Exemplary of such anti-cancer agents include Gefitinib, Tykerb, Panitumumab, Erlotinib, Cetuximab, Trastuzumab, Imatinib, a platinum complex or a nucleoside analog. Other anticancer agents, include radiation therapy or a chemotherapeutic agent and/or growth inhibitory agent, including coadministration of cocktails of different chemotherapeutic agents. Examples of cytotoxic agents or chemotherapeutic agents include, for example, taxanes (such as paclitaxel and docetaxel) and anthracycline antibiotics, doxorubicin/adriamycin, carminomycin, daunorubicin, aminopterin, methotrexate, chlorambucil, methopterin, dichloro-methotrexate, mitomycin C, porfiromycin, 5-fluorouracil, 6-mercaptopurine, cytosine arabinoside, podophyllotoxin, or podophyllotoxin derivatives such as etoposide or etoposide phosphate, melphalan, vinblastine, vincristine, leurosidine, vindesine, maytansinol, epothilone A or B, taxotere, taxol, and the like. Other such therapeutic agents include estramustine, cisplatin, combretastatin and analogs, and cyclophosphamide. Preparation and dosing schedules for such chemotherapeutic agents can be used according to manufacturers' instructions or as determined empirically by the skilled practitioner. Preparation and dosing schedules for such chemotherapy also are described in Chemotherapy Service Ed., M. C. Perry, Williams & Wilkins, Baltimore, Md. (1992).

[0579] Additional compounds can be used in combination therapy with oncovector constructs. Anti-hormonal compounds can be used in combination therapies, such as with oncovector constructs, to treat certain tumors. Examples of such compounds include an anti-estrogen compound such as tamoxifen; an anti-progesterone such as onapristone and an anti-androgen such as flutamide, in dosages known for such molecules. It also can be beneficial to coadminister a cardioprotectant (to prevent or reduce myocardial dysfunction that can be associated with therapy) or one or more cytokines. In addition to the above therapeutic regimes, the patient can be subjected to surgical removal of cancer cells and/or radiation therapy.

[0580] Adjuvants and other immune modulators can be used in combination with oncovector constructs in treating cancers, for example to increase immune response to tumor cells. Combination therapy can increase the effectiveness of treatments and in some cases, create synergistic effects such that the combination is more effective than the additive effect of the treatments separately. Examples of adjuvants include, but are not limited to, bacterial DNA, nucleic acid fraction of attenuated mycobacterial cells (BCG; Bacillus-Calmette-Guerin), synthetic oligonucleotides from the BCG genome, and synthetic oligonucleotides containing CpG motifs (CpG ODN; Wooldridge et al. (1997) Blood 89:2994-2998), levamisole, aluminum hydroxide (alum), BCG, Incomplete Freud's Adjuvant (IFA), QS-21 (a plant derived immunostimulant), keyhole limpet hemocyanin (KLH), and dinitrophenyl (DNP). Examples of immune modulators include but are not limited to, cytokines such as interleukins (e.g., IL-2, IL-3, IL-4, IL-5, IL-6, IL-7, IL-9, IL-10, IL-11, IL-12, IL-13, IL-15, IL-16, IL-17, IL-18, IL-1α, IL-1β, and IL-1 RA), granulocyte colony stimulating factor (G-CSF), granulocyte-macrophage colony stimulating factor (GM-CSF), oncostatin M, erythropoietin, leukemia inhibitory factor (LIF), interferons, B7.1 (also known as CD80), B7.2 (also known as B70, CD86), TNF family members (TNF-α, TNF-β, LT-β, CD40 ligand, Fas ligand, CD27 ligand, CD30 ligand, 4-1BBL, Trail), and MIF.

### I. EXAMPLES

[0581] The following examples are put forth so as to provide those of ordinary skill in the art with a disclosure and description of how to make and use embodiments of the present disclosure, and are not intended to limit the scope of what the inventors regard as their invention nor are they intended to represent that the experiments below are all or the only experiments performed. Efforts have been made to ensure accuracy with respect to numbers used (e.g. amounts, temperature, etc.) but some experimental errors and deviations should be accounted for. Unless indicated otherwise, parts are parts by weight, molecular weight is weight average molecular weight, temperature is in degrees Celsius, and pressure is at or near atmospheric. Standard abbreviations may be used, e.g., bp, base pair(s); kb, kilobase(s); pl, picoliter(s); s or sec, second(s); min, minute(s); h or hr, hour(s); aa, amino acid(s); kb, kilobase(s); bp, base pair(s); nt, nucleotide(s); i.m., intramuscular(ly); i.p., intraperitoneal(ly) s.c., subcutaneous(ly); and the like.

### Example 1

### Optimization of Construct Components

[0582] In this example, components of constructs provided herein were modified to optimize human codon usage (human optimization), and also were modified to remove CpG motifs to reduce immunogenicity. The following considerations were followed during the optimization of all components.

[0583] 1) Any codon that contains a CpG motif was not used in the optimized sequence. In analyzing the human codon optimized usage for a particular gene sequence, the number and fraction for these codons were listed as zero (see below for optimization of SV40 T antigen (TAg).

[0584] 2) Any two codons placed next to each other can form a CpG motif. Thus, the choice of any codon was made to avoid these combinations.

[0585] 3) The sequences were optimized based on the human codon usage frequency table (Table 15) to balance the percentages of codons selected with the published abundance of human transfer RNAs so that no codon is overloaded or limiting. In order to do this in a CpG-free manner, the first two considerations above were followed while balancing the codon frequencies.

[0586] 4) New restriction sites can be generated during codon modifications. Thus, to ensure that unique restriction sites are still unique after modification, the modified sequences were checked with the Gene Construction Kit® sequence analysis program by Textco. If an unwanted restriction site was generated, the sequence was further modified by silent mutations to disrupt the unwanted sequences.

[0587] In performing the analysis above for modification of the component sequences, the Gene Construction Kit® was used to design sequences, to analyze restriction sites, and to analyze CpG motifs. Also, the analysis program was programmed to recognize specific unique restriction sites, and was programmed to search for “CG” as a general CpG motif and also “TCG” as a screen for the core optimal human CpG.

[0588] For example, using the methods outlined above, the wild-type TAg was synthesized using the reference amino acid sequence of the SV40 polyoma virus, with the introns removed (GenBank accession No. NC_{—}001669; the nucleotide sequence is set forth in SEQ ID NO: 561, encoding a sequence of amino acids set forth in SEQ ID NO: 564). The TAg gene sequence was then modified to optimize codon usage within human cells and to eliminate the presence of CpG dinucleotides (CpG-free gene coding sequence) as described below.

[0589] TAg has a sequence of nucleotides that is fairly devoid of CpG dinucleotides (see e.g., SEQ ID NO: 561). There are two CG dinucleotides in the sequence. The first corresponds to nucleotide positions 1045-7 (CGG) and codes for an arginine. It was modified to AGA, which also codes for arginine but does not contain a CpG motif. The second corresponds to nucleotide positions 1675-7 (CGC) and also codes for arginine. This was changed to AGG, which also codes for arginine but does not contain a CpG motif. The sequence of the CpG modified TAg is set forth in SEQ ID NO: 562.

[0590] Following CpG modification of TAg, the sequence was modified for human codon optimization. In the process of human codon optimization, new CpG motifs were generated. These were eliminated using the same process as outlined above. The sequence was again modified for human optimization. The process was repeated a few times before the final sequence CpG-free, human codon optimized sequence was determined. The human codon optimized usage of CpG-free TAg is depicted below.

TABLE 15
Human Codon Optimized Usage
of TAg synthesized CpG-free

| Amino | | | |
|---|---|---|---|
| Acid | Codon | Number | Fraction |
| ALA | GCA | 13 | 0.34 |
| ALA | GCC | 7 | 0.18 |
| ALA | GCG | 0 | 0 |
| ALA | GCT | 18 | 0.47 |
| ARG | AGA | 13 | 0.48 |
| ARG | AGG | 14 | 0.51 |
| ARG | CGA | 0 | 0 |
| ARG | CGC | 0 | 0 |
| ARG | CGG | 0 | 0 |
| ARG | CGT | 0 | 0 |
| ASN | AAC | 14 | 0.41 |
| ASN | AAT | 20 | 0.58 |
| ASP | GAC | 17 | 0.35 |
| ASP | GAT | 31 | 0.64 |
| CYS | TGC | 3 | 0.2 |
| CYS | TGT | 12 | 0.8 |
| END | TAA | 0 | 0 |
| END | TAG | 0 | 0 |
| END | TGA | 1 | 1 |
| GLN | CAA | 8 | 0.27 |
| GLN | CAG | 21 | 0.72 |
| GLU | GAA | 30 | 0.52 |
| GLU | GAG | 27 | 0.47 |
| GLY | GGA | 13 | 0.36 |
| GLY | GGC | 4 | 0.11 |
| GLY | GGG | 7 | 0.19 |
| GLY | GGT | 12 | 0.33 |
| HIS | CAC | 6 | 0.31 |
| HIS | CAT | 13 | 0.68 |
| ILE | ATA | 10 | 0.33 |
| ILE | ATC | 7 | 0.23 |
| ILE | ATT | 13 | 0.43 |
| LEU | CTA | 0 | 0 |
| LEU | CTC | 17 | 0.23 |
| LEU | CTG | 25 | 0.35 |
| LEU | CTT | 16 | 0.22 |
| LEU | TTA | 0 | 0 |
| LEU | TTG | 13 | 0.18 |
| LYS | AAA | 27 | 0.42 |
| LYS | AAG | 36 | 0.57 |
| MET | ATG | 23 | 1 |
| PHE | TTC | 16 | 0.44 |
| PHE | TTT | 20 | 0.55 |
| PRO | CCA | 10 | 0.31 |
| PRO | CCC | 8 | 0.25 |
| PRO | CCG | 0 | 0 |
| PRO | CCT | 14 | 0.43 |
| SER | AGC | 5 | 0.1 |
| SER | AGT | 13 | 0.27 |
| SER | TCA | 7 | 0.14 |
| SER | TCC | 8 | 0.17 |
| SER | TCG | 0 | 0 |
| SER | TCT | 14 | 0.29 |
| THR | ACA | 11 | 0.35 |
| THR | ACC | 7 | 0.22 |
| THR | ACG | 0 | 0 |
| THR | ACT | 13 | 0.41 |
| TRP | TGG | 12 | 1 |
| TYR | TAC | 7 | 0.26 |
| TYR | TAT | 19 | 0.73 |
| VAL | GTA | 6 | 0.17 |
| VAL | GTC | 9 | 0.26 |
| VAL | GTG | 16 | 0.47 |
| VAL | GTT | 3 | 0.08 |

[0591] The sequence also was checked for restriction sites, and any restriction sites that were in common with desired unique restriction sites within the final vector (described in Example 5) were disrupted. For example, within the sequence of wild-type TAg is an AseI site (ATTAAT set forth in SEQ ID NO: 550), corresponding to nucleotides 622-628 of the sequence for wild-type TAg (SEQ ID NO: 561). The final construct also contains an AseI restriction site, which was designed to be a unique restriction site at the 5′ end of the human cytomegalovirus (CMV) immediate early promoter. Therefore, a silent mutation was created in ATTAAT to include the following change: ATTAAc (the lower case nucleotide being the changed nucleotide). In the optimized sequence of TAg set forth in SEQ ID NO: 563 these nucleotides, corresponding to positions 622-628, were changed from ATTAAT to ATTAAc.

[0592] The final optimized CpG-free, human codon optimized sequence is set forth in SEQ ID NO: 563. The resulting CpG-free, human codon optimized modified sequence was synthesized by using hybridizing nucleotides and performing overlapping PCR with the proof reading DNA polymerase Pfu1 as described in Example 2 below. Oligonucleotides were generated and synthesis was performed by Integrated DNA Technologies (Coralville, Iowa). The CpG-free, human codon optimized sequence encodes a sequence of amino acids that is the same sequence encoded by wild-type TAg, i.e. an amino acid sequence set forth in SEQ ID NO: 564.

[0593] Similar methods were used to modify other components. Exemplary of constructs that were modified are set forth below in Table 16.

TABLE 16
Modified construct components

| | | | | CpG Modified and Hu- | | |
|---|---|---|---|---|---|---|
| | Unmodified | | CpG Modified | man Codon Optimized | | |
| | SEQ ID NO | | SEQ ID NO | SEQ ID NO | | |
| | (SEQ ID NO | | (SEQ ID NO | (SEQ ID NO | | Protein |
| | with terminal | | with terminal | with terminal | | SEQ ID |
| Component | restriction sites | | restriction sites | restriction sites | | NO |
| Internal Ribosomal | 103, 104 | | 102 | n/a | | n/a |
| Entry Site (IRES) | | | | | | |
| Enhanced Green | 543 | | n/a | 54 | | 544, 546 |
| Fluorescent Protein | | | | | | |
| (EGFP) | | | | | | |
| SV40 T antigen | 561 | | 562 | 563 | | 564 |
| SV40 early | 113, 114 | | 115, 116 | n/a | | n/a |
| promoter/ori | | | | | | |
| Kanomycin/Neomycin | 105 | | 106, 107 | 108, 109 | | 110 |
| resistance gene | | | | | | |
| (Kan/NeoR) | | | | | | |
| Kan/NeoR bacterial | 503 | | 107 | n/a | | n/a |
| promoter | | | | | | |
| HSV-TK gene | 498 | | n/a | 499 | | 501 |
| E2F1 Promoter | 534, 535 | | 536, 537 | n/a | | n/a |
| Avian Reovirus p10 | 8, 10 | (72, 74) | n/a | 9, 11 | (73, 75) | 39, 40 |
| Reptile Reovirus p14 | 12 | (76) | n/a | 13 | (77) | 41 |
| (RRVp14) | | | | | | |
| HERV3 | 35 | (100) | n/a | 36 | (101) | 58 |
| Baboon Reovirus p15 | 14 | (78) | n/a | n/a | | 42 |
| (BRVp15) | | | | | | |
| Gibbon Ape Leukemia | 15 | (80) | n/a | 16 | (81) | 43 |
| Virus Envelope | | | | | | |
| Protein (GALV) | | | | | | |
| Simian Virus5-F | 17 | (83) | n/a | 18 | (82) | 44 |
| Protein (SV5F) | | | | | | |
| Vesicular Stomatitis | 6 | (70) | n/a | 7 | (71) | 38 |
| Virus Protein G | | | | | | |
| (VSVG) | | | | | | |

### Example 2

### Generation of Synthetic Genes

[0594] Gene synthesis of construct components was performed by hybridizing oligonucleotides and performing overlap extension polymerase chain reaction with the proofreading DNA polymerase Pfu1. Most of the synthesized cDNAs were created by one of the following contract research organizations: Eton Bioscience Inc. (San Diego, Calif.), Blue Heron Biotechnology Inc. (Bothell, Wash.), or GenScript (Piscataway, N.J.). In each case, the synthetic genes were generated with NheI/BamHI or BstXI/NotI flanking restriction sites to facilitate insertion of the genes into expression vectors (described in Example 5). Primer oligonucleotides used for synthesizing genes of interest were synthesized by Integrated DNA Technologies, Inc. (San Diego, Calif.). The oligonucleotides used in the synthesis of exemplary genes are set forth in Table 17 below.

TABLE 17
Oligonucleotides used in the synthesis of exemplary genes

| | | Primer |
|---|---|---|
| | | SEQ ID |
| Gene | Oligonucleotide | NO |
| Avian Reovirus (ARV) p10 | AF1 - forward primer | 274 |
| | AF2 - forward primer | 275 |
| | AF3 - forward primer | 276 |
| | AF4 - forward primer | 277 |
| | AF5 - forward primer | 278 |
| | AR1 - reverse primer | 279 |
| | AR2 - reverse primer | 280 |
| | AR3 - reverse primer | 281 |
| | AR4 - reverse primer | 282 |
| Reptilian Reovirus | RRF1 - forward primer | 283 |
| (RRV) p14 | RRF2 - forward primer | 284 |
| | RRF3 - forward primer | 285 |
| | RRF4 - forward primer | 286 |
| | RRF5 - forward primer | 287 |
| | RRR1 - reverse primer | 288 |
| | RRR2 - reverse primer | 289 |
| | RRR3 - reverse primer | 290 |
| | RRR4 - reverse primer | 291 |
| | RRR5 - reverse primer | 292 |
| Baboon Reovirus (BRV) p15 | BRF1 - forward primer | 293 |
| | BRF2 - forward primer | 294 |
| | BRF3 - forward primer | 295 |
| | BRF4- forward primer | 296 |
| | BRF5 - forward primer | 297 |
| | BRF6 - forward primer | 298 |
| | BRR1 - reverse primer | 299 |
| | BRR2 - reverse primer | 300 |
| | BRR3 - reverse primer | 301 |
| | BRR4 - reverse primer | 302 |
| | BRR5 - reverse primer | 303 |
| | BRR6 - reverse primer | 304 |
| zGFP (cpG-free) | 1F1 - forward primer | 305 |
| | 1F2 - forward primer | 306 |
| | 1F3 - forward primer | 307 |
| | 1F4 - forward primer | 308 |
| | 1F5 - forward primer | 309 |
| | 1F6 - forward primer | 310 |
| | 2F1 - forward primer | 311 |
| | 2F2 - forward primer | 312 |
| | 2F3 - forward primer | 313 |
| | 1R1 - reverse primer | 314 |
| | 1R2 - reverse primer | 315 |
| | 1R3 - reverse primer | 316 |
| | 1R4 - reverse primer | 317 |
| | 1R5 - reverse primer | 318 |
| | 2R1 - reverse primer | 319 |
| | 2R2 - reverse primer | 320 |
| | Prev1 - reverse primer | 321 |
| | Prev2 - reverse primer | 322 |
| | Prev3 - reverse primer | 323 |
| Simian virus 5 F (SV5F) | SV1F1 - forward primer | 324 |
| | SV1F2 - forward primer | 325 |
| | SV1F3 - forward primer | 326 |
| | SV1F4 - forward primer | 327 |
| | SV1F5 - forward primer | 328 |
| | SV1F6 - forward primer | 329 |
| | SV1F7 - forward primer | 330 |
| | SV1F8 - forward primer | 331 |
| | SV1F9 - forward primer | 332 |
| | SV1R1 - reverse primer | 333 |
| | SV1R2 - reverse primer | 334 |
| | SV1R3 - reverse primer | 335 |
| | SV1R4 - reverse primer | 336 |
| | SV1R5 - reverse primer | 337 |
| | SV1R6 - reverse primer | 338 |
| | SV1R7 - reverse primer | 339 |
| | SV2F1 - forward primer | 340 |
| | SV2F2 - forward primer | 341 |
| | SV2F3 - forward primer | 342 |
| | SV2F4 - forward primer | 343 |
| | SV2F5 - forward primer | 344 |
| | SV2F6 - forward primer | 345 |
| | SV2F7 - forward primer | 346 |
| | SV2R1 - reverse primer | 347 |
| | SV2R2 - reverse primer | 348 |
| | SV2R3 - reverse primer | 349 |
| | SV2R4 - reverse primer | 350 |
| | SV2R5 - reverse primer | 351 |
| | SV2R6 - reverse primer | 352 |
| | SV2R7 - reverse primer | 353 |
| | SV3F2 - forward primer | 355 |
| | SV3F3 - forward primer | 356 |
| | SV3F4 - forward primer | 357 |
| | SV3F5 - forward primer | 358 |
| | SV3R1 - reverse primer | 359 |
| | SV3R2 - reverse primer | 360 |
| | SV3R3 - reverse primer | 361 |
| | SV3R4 - reverse primer | 362 |
| | SV3R5 - reverse primer | 363 |
| | SV3R6 - reverse primer | 364 |
| SV40Tag (TAg) | 1F1 - forward primer | 365 |
| | 1F2 - forward primer | 366 |
| | 1F3 - forward primer | 367 |
| | 1F4 - forward primer | 368 |
| | 1F5 - forward primer | 369 |
| | 1F6 - forward primer | 370 |
| | 1F7 - forward primer | 371 |
| | 1R1 - reverse primer | 372 |
| | 1R2 - reverse primer | 373 |
| | 1R3 - reverse primer | 374 |
| | 1R4 - reverse primer | 375 |
| | 1R5 - reverse primer | 376 |
| | 1R6 - reverse primer | 377 |
| | 1R7 - reverse primer | 378 |
| | 2F1 - forward primer | 379 |
| | 2F2 - forward primer | 380 |
| | 2F3 - forward primer | 381 |
| | 2F4 - forward primer | 382 |
| | 2F5 - forward primer | 383 |
| | 2F6 - forward primer | 384 |
| | 2F7 - forward primer | 385 |
| | 2R1 - reverse primer | 386 |
| | 2R2 - reverse primer | 387 |
| | 2R3 - reverse primer | 388 |
| | 2R4 - reverse primer | 389 |
| | 2R5 - reverse primer | 390 |
| | 2R6 - reverse primer | 391 |
| | 2R7 - reverse primer | 392 |
| | 3F1 - forward primer | 393 |
| | 3F2 -forward primer | 394 |
| | 3F3 -forward primer | 395 |
| | 3F4 - forward primer | 396 |
| | 3F5 - forward primer | 397 |
| | 3F6 - forward primer | 398 |
| | 3F7 - forward primer | 399 |
| | 3R1 - reverse primer | 400 |
| | 3R2 - reverse primer | 401 |
| | 3R3 - reverse primer | 402 |
| | 3R4 - reverse primer | 403 |
| | 3R5 - reverse primer | 404 |
| | 3R6 - reverse primer | 405 |
| | 3R7 - reverse primer | 406 |
| | 4F1 - forward primer | 407 |
| | 4F2 - forward primer | 408 |
| | 4F3 - forward primer | 409 |
| | 4F4 - forward primer | 410 |
| | 4F5 - forward primer | 411 |
| | 4F6 - forward primer | 412 |
| | 4R1 - reverse primer | 413 |
| | 4R2 - reverse primer | 414 |
| | 4R3 - reverse primer | 415 |
| | 4R4 - reverse primer | 416 |
| | 4R5 - reverse primer | 417 |
| | 4R6 - reverse primer | 418 |
| Vesicular stomatitis | 1F1 - forward primer | 419 |
| virus G protein (VSVG) | 1F2 - forward primer | 420 |
| | 1F3 - forward primer | 421 |
| | 1F4 - forward primer | 422 |
| | 1F5 - forward primer | 423 |
| | 1F6 - forward primer | 424 |
| | 1F7 - forward primer | 425 |
| | 1F8 - forward primer | 426 |
| | 1R1 - reverse primer | 427 |
| | 1R2 - reverse primer | 428 |
| | 1R3 - reverse primer | 429 |
| | 1R4 - reverse primer | 430 |
| | 1R5 - reverse primer | 431 |
| | 1R6 - reverse primer | 432 |
| | 2F1 - forward primer | 433 |
| | 2F2 - forward primer | 434 |
| | 2F3 - forward primer | 435 |
| | 2F4 - forward primer | 436 |
| | 2F5 - forward primer | 437 |
| | 2F6 - forward primer | 438 |
| | 2R1 - reverse primer | 439 |
| | 2R2 - reverse primer | 440 |
| | 2R3 - reverse primer | 441 |
| | 2R4 - reverse primer | 442 |
| | 2R5 - reverse primer | 443 |
| | 2R6 - reverse primer | 444 |
| | 2R7 - reverse primer | 445 |
| | 3F1 - forward primer | 446 |
| | 3F2 - forward primer | 447 |
| | 3F3 - forward primer | 448 |
| | 3F4 - forward primer | 449 |
| | 3F5 - forward primer | 450 |
| | 3R1 - reverse primer | 451 |
| | 3R2 - reverse primer | 452 |
| | 3R3 - reverse primer | 453 |
| | 3R4 - reverse primer | 454 |
| | 3R5 - reverse primer | 455 |
| | 3R6 - reverse primer | 456 |

[0595] An exemplary illustration for the gene synthesis of Avian Reovirus (ARV) ARVp10 using the above-noted oligonucleotides is set forth in FIG. 4. The synthesized genes were inserted into pCR2.1-Topo-TA (Invitrogen; SEQ ID NO: 470). The topo-TA kit allowed for instant ligation of a gene fragment containing an adenine nucleotide overhang, which was ligated with a topoisomerase enzyme that was linked to the provided vector. Using similar methods, exemplary resulting synthesized genes are set forth in Table 18 below.

TABLE 18
Nucleotide and amino acid sequences of synthesized genes

| | Gene | Protein |
|---|---|---|
| | Product | Product |
| Gene | SEQ ID NO | SEQ ID NO |
| Avian Reovirus (ARV) p10 | 73 | 39 |
| Reptilian Reovirus (RRV) p14 | 77 | 41 |
| Baboon Reovirus (BRV) p15 | 78 | 42 |
| zGFP (cpG-free, human | 545 | 546 |
| codon-optimized EGFP) | | |
| Simian virus 5 F (SV5F) | 82 | 44 |
| SV40Tag (TAg) | 563 | 564 |
| Vesicular stomatitis virus G | 71 | 38 |
| protein (VSVG) | | |

### Example 3

### Modification of SV40 T Antigen (TAg)

[0596] In this example, TAg was modified to disrupt the binding sites for P53, Rb and HSP70. TAg mutations were rationally designed based on binding sites known in the art for p53 (Schmieg and Simmons, (1988) Virology. 164(1):132-40; Kierstead and Tevethia, (1993) J Virol. 67(4):1817-1829), Rb (DeCaprio et al., (1988) Cell. 54(2):275-283), and HSP70 (Campbell et al., (1997) Genes Dev. 11(9):1098-1110).

[0597] The TAg mutations were introduced by site-directed mutagenesis using the Quickchange Site-Directed mutagenesis kit (Stratagene), according to the manufacturer's instructions, with specifically-designed complementary oligonucleotides which served as primers that incorporated one or more codons encoding one or more amino acids that differ from the wild-type amino acid at that position into the newly synthesized DNA. The complementary oligonucleotide primers are set forth in Table 19 below. The codons encoding the substitute amino acids are set forth in bold and underlined.

TABLE 19
Mutagenesis Primers for TAg Mutants

| TAg | | | SEQ |
|---|---|---|---|
| Mutant | Primer | Mutagenesis Primer Sequence | ID NO |
| L19F | forward | 5′ CAACTGATGGATCTGTTGGGATTTGAGAGGTCTGCATG | 202 |
| | | GGGTAATATC 3′ | |
| | reverse | 5′ GATATTACCCCATGCAGACCTCTCAAATCCCAACAGAT | 203 |
| | | CCATCAGTTG 3′ | |
| P28S | forward | 5′ GGTCTGCATGGGGTAATATCTCCCTTATGAGGAAAGCA | 204 |
| | | TACCTG 3′ | |
| | reverse | 5′ CAGGTATGCTTTCCTCATAAGGGAGATATTACCCCATG | 205 |
| | | CAGACC 3′ | |
| L103P | forward | 5′ CATTTAATGAAGAGAATCCATTTTGCTCTGAGG 3′ | 206 |
| | reverse | 5′ CCTCAGAGCAAAATGGATTCTCTTCATTAAATG 3′ | 207 |
| C105A | forward | 5′ GAAGAGAATTTGTTTGCTTCTGAGGAAATGCC 3′ | 208 |
| | reverse | 5′ GGCATTTCCTCAGAAGCAAACAAATTCTCTTC 3′ | 209 |
| E107L | forward | 5′ GAGAATTTGTTTTGCTCTCTGGAAATGCCTAGTTCTG 3′ | 210 |
| | reverse | 5′ CAGAACTAGGCATTTCCAGAGAGCAAAACAAATCTC 3′ | 211 |
| E107K | forward | 5′ GAGAATTTGTTTTGCTCTAAGGAAATGCCTAGTTCTG 3′ | 212 |
| | reverse | 5′ CAGAACTAGGCATTTCCTTAGAGCAAAACAAATTCTC 3′ | 213 |
| E108L | forward | 5′ GAATTTGTTTTGCTCTGAGCTCATGCCTAGTTCTG 3′ | 214 |
| | reverse | 5′ CAGAACTAGGCATGAGCTCAGAGCAAAACAAATTC 3′ | 215 |
| S112N | forward | 5′ GGAAATGCCTAGTAATGATGATGAGG 3′ | 216 |
| | reverse | 5′ CCTCATCATCATTACTAGGCATTTCC 3′ | 217 |
| S189N | forward | 5′ CCAGGCACAACAACTATAATCATAATATTC 3′ | 218 |
| | reverse | 5′ GAATATTATGATTATAGTTGTTGTGCCTGG 3′ | 219 |
| D402R | forward | 5′ CACTGTCTCCTCCCTAAAATGAGGAGTGTAGTCTATG | 220 |
| | | ACTTCCT 3′ | |
| | reverse | 5′ AGGAAGTCATAGACTACACTCCTCATTTTAGGGAGGA | 221 |
| | | GACAGTG 3′ | |
| P453S | forward | 5′ GGAAAGCTCTCAATGTCAACCTGTCCCTTGATAGACTC | 222 |
| | | AACTTTG 3′ | |
| | reverse | 5′ CAAAGTTGAGTCTATCAAGGGACAGGTTGACATTGAG | 223 |
| | | AGCTTTCC 3′ | |
| V585R | forward | 5′ TATGCTGATATGGTATAGACCAAGGGCTGAGTTTGCC | 224 |
| | | AAAGCATTC 3′ | |
| | reverse | 5′ GAATGCTTTGGGCAAACTCAGCCCTTGGTCTATACCAA | 225 |
| | | TCAGCATA 3′ | |
| D604R | forward | 5′ TGAGTGGAAAGAAAGGCTTAGAAAGGAGTTTTCTCTT | 226 |
| | | TCAGT 3′ | |
| | reverse | 5′ ACTGAAAGAGAAAACTCCTTTCTAAGCCTTTCTTTCCA | 227 |
| | | CTCA 3′ | |
| Δ366- | forward | 5′ GGAGCAGATGTTGACAAATAGGTTCAGAATGGACATA | 228 |
| 370 | | ATGTTTGGC 3′ | |
| | reverse | 5′ GCCAAACATTATGTCCATTCTGAACCTATTTGTCAACA | 229 |
| | | TCTGCTCC 3′ | |
| Δ434- | forward | 5′ GGACCCATTGATTCAGGGAAAACTGGAAAGCTCTCAA | 230 |
| 444 | | TGTCAACC 3′ | |
| | reverse | 5′ GGTTGACATTGAGAGCTTTCCAGTTTTCCCTGAATCAA | 231 |
| | | TGGGTCC 3′ | |
| L103P/ | forward | 5′ CATTTAATGAAGAGAATCCATTTGCTTCTGAGGAAAT | 232 |
| C105A | | GC 3′ | |
| | reverse | 5′ GCATTTCCTCAGAAGCAAATGGATTCTCTTCATTAAA | 233 |
| | | TG 3′ | |
| L103P/ | forward | 5′ GCATTTAATGAAGAGAATCCATTTTGCTCTCTGGAAA | 234 |
| E107L | | TGCCTAG 3′ | |
| | reverse | 5′ CTAGGCATTTCCAGAGAGCAAAATGGATTCTCTTCAT | 235 |
| | | TAAATGC 3′ | |
| L103P/ | forward | 5′ GCATTTAATGAAGAGAATCCATTTTGCTCTGAGCTCA | 236 |
| E108L | | TGCCTAGTTC 3′ | |
| | reverse | 5′ GAACTAGGCATGAGCTCAGAGCAAAATGGATTCTCTT | 237 |
| | | CATTAAATGC 3′ | |
| C105A/ | forward | 5′ GAAGAGAATTTGTTTGCTTCTCTGGAAATGCCTAGTT | 238 |
| E107L | | CTGATGATGAG 3′ | |
| | reverse | 5′ CTCATCATCAGAACTAGGCATTTCCAGAGAAGCAAAC | 239 |
| | | AAATTCTCTTC 3′ | |
| E107L/ | forward | 5′ GAAGAGAATTTGTTTTGCTCTCTGCTCATGCCTAGTTC | 242 |
| E108L | | TGATGATGAG 3′ | |
| | reverse | 5′ CTCATCATCAGAACTAGGCATGAGCAGAGAGCAAAA | 243 |
| | | CAAATTCTCTTC 3′ | |
| C105A/ | forward | 5′ GAAGAGAATTTGTTTGCTTCTCTGCTCATGCCTAGTTC | 244 |
| E107L/ | | TGATGATG 3′ | |
| E108L | reverse | 5′ CATCATCAGAACTAGGCATGAGCAGAGAAGCAAACA | 245 |
| | | AATTCTCTTC 3′ | |
| L103P/ | forward | 5′ GGAATGCATTTAATGAAGAGAATCCATTTTGCTCTCTG | 246 |
| E107L/ | | CTCATGCCTAGTTCTGATGATG 3′ | |
| E108L | reverse | 5′ CATCATCAGAACTAGGCATGAGCAGAGAGCAAAATGG | 247 |
| | | ATTCTCTTCATTAAATGCATTCC 3′ | |
| L103P/ | forward | 5′ GGAATGCATTTAATGAAGAGAATCCATTTGCTTCTCTG | 248 |
| C105A/ | | CTCATGCCTAGTTCTGATGATG 3′ | |
| E107L/ | reverse | 5′ CATCATCAGAACTAGGCATGAGCAGAGAAGCAAATG | 249 |
| E108L | | GATTCTCTTCATTAAATGCATTCC 3′ | |
| E107L/ | forward | 5′ GAATTTGTTTTGCTCTCTGCTCATGCCTAGTAATGATG | 250 |
| E108L/ | | ATGAGG 3′ | |
| S112N | reverse | 5′ CCTCATCATCATTACTAGGCATGAGCAGAGAGCAAAA | 251 |
| | | CAAATTC 3′ | |
| C105A/ | forward | 5′ GAAGAGAATTTGTTTGCTTCTCTGCTCATGCCTAGTAA | 252 |
| E107L/ | | TGATGATGAGG 3′ | |
| E108L/ | reverse | 5′ CCTCATCATCATTACTAGGCATGAGCAGAGAAGCAA | 253 |
| S112N | | ACAAATTCTCTTC 3′ | |
| C105A/ | forward | 5′ GAAGAGAATTTGTTTGCTTCTGAGCTCATGCCTAGTA | 254 |
| E108L/ | | ATGATGATGAGG 3′ | |
| S112N | reverse | 5′ CCTCATCATCATTACTAGGCATGAGCTCAGAAGCAAA | 255 |
| | | CAAATTCTCTTC 3′ | |
| C105A/ | forward | 5′ GAAGAGAATTTGTTTGCTTCTCTGGAAATGCCTAGTA | 256 |
| E107L/ | | ATGATGATGAGG 3′ | |
| S112N | reverse | 5′ CCTCATCATCATTACTAGGCATTTCCAGAGAAGCAAA | 257 |
| | | CAAATTCTCTTC 3′ | |
| C105A/ | forward | 5′ GAAGAGAATTTGTTTGCTTCTGAGCTCATGCCTAGTTC | 240 |
| E108L | | TGATGATGAG 3′ | |
| | reverse | 5′ CTCATCATCAGAACTAGGCATGAGCTCAGAAGCAAAC | 241 |
| | | AAATTCTCTTC 3′ | |
| C105A/ | forward | 5′ GAATTTGTTTGCTTCTGAGGAAATGCCTAGTAATGAT | 258 |
| S112N | | GATGAGG 3′ | |
| | reverse | 5′ CCTCATCATCATTACTAGGCATTTCCTCAGAAGCAAA | 259 |
| | | CAAATTC 3′ | |

[0598] The QuikChange method involves linear amplification of template DNA by the Pfu 1 Ultra high-fidelity DNA polymerase. The forward and reverse primer pairs, both containing one or more codons for substitute amino acids, were extended during cycling using the pCMV-SV40Tag (WT)-I-GFP (SEQ ID NO: 695) plasmid as a template (see Example 6A). Extension of the primers resulted in incorporation of the new codons into the newly synthesized strands, and resulted in a mutated plasmid with staggered nicks. Following amplification, the nucleic acid was treated with DpnI, which digests the dam-methylated parental strands of the pCMV-SV40TAg-WT-I-GFP plasmid. This resulted in “selection” of the newly-synthesized mutated plasmids, which were not methylated. The vector DNA containing the new codons was transformed into XL1-Blue supercompetent E. coli cells (Invitrogen), where bacterial ligase repaired the nicks and allowed normal replication to occur. Wild-type and mutant TAg genes were sequenced using the forward sequencing primers set forth in SEQ ID NOS: 467, 468, and 461 which begin within the TAg gene at 494, 1125, 1786 bp, respectively. The protein sequences of TAg mutants are set forth in Table 20 below. Exemplary generated constructs containing SV40-TAg mutants are described in Example 6.

TABLE 20
CpG-free SV40-TAg mutant protein sequences

| | SEQ ID |
|---|---|
| SV40-TAg Mutant | NO |
| L19F | 565 |
| E107L | 566 |
| E107K | 567 |
| E108L | 568 |
| D402R | 569 |
| D402E | 570 |
| P453S | 571 |
| V585R | 572 |
| D604R | 573 |
| P28S | 574 |
| L103P | 575 |
| C105A | 576 |
| S112N | 577 |
| S189N | 578 |
| E107L/E108L | 579 |
| L103P/C105A | 580 |
| L103P/E107K | 581 |
| C105A/E107K | 582 |
| C105A/D402E | 583 |
| C105A/V585R | 584 |
| E107K/V585R | 585 |
| E107K/D402E | 586 |
| L103P/D402E | 587 |
| L103P/V585R | 588 |
| E107L/E108L/D402R | 589 |
| E107L/E108L/P453S | 590 |
| E107L/E108L/V585R | 591 |
| E107L/E108L/D604R | 592 |
| E107L/E108L/L19F/D402R | 593 |
| E107L/E108L/L19F/P453S | 594 |
| E107L/E108L/L19F/V585R | 595 |
| E107L/E108L/L19F/D604R | 596 |
| E107L/E108L/P28S/D402R | 597 |
| E107L/E108L/P28S/P453S | 598 |
| E107L/E108L/P28S/V585R | 599 |
| E107L/E108L/P28S/D604R | 600 |
| E107L/E108L/L19F/P28S/L103P/C105A/V585R | 601 |
| E107L/E108L/L19F/P28S/L103P/C105A/D604R | 602 |
| delta 366-370 (deletion) | 603 |
| delta 434-444 (deletion) | 604 |

### Example 4

### Modification of SV5F Protein

[0599] In this example, the SV5F gene was modified in order to enhance the fusogenic capacity of the encoded SV5F protein. The mutations were rationally designed based on amino acid changes known in the art to improve the alphα-helix and hydrophobicity of the fusogenic peptide (Bagai and Lamb, (1997) Virology 238(2):283-90; Russell et al., (2004) J Virology. 78(24):13727-42). The synthesized WT SV5F cDNA was subcloned into the pIRES-EGFP backbone construct designated pCMV-I-zGFP plasmid (SEQ ID NO: 694; see Example 5) using NheI-BamHI restriction sites generated during PCR in order to make pCMV-SV5F-WT-I-zGFP plasmid (SEQ ID NO: 718). The SV5F mutations were introduced by site-directed mutagenesis using the Quickchange Site-Directed mutagenesis kit (Stratagene), as described above, using the pCMV-SV5F-WT-I-zGFP plasmid (SEQ ID NO: 718) as a template. Specifically-designed complementary oligonucleotides served as primers that incorporated one or more codons encoding one or more amino acids that differed from the wild-type amino acid at that position into the newly synthesized DNA. The complementary oligonucleotide primers for the SV5F mutants are set forth in Table 21 below. The codons encoding the substitute amino acids are set forth in bold and underlined.

[0600] After sequencing to verify the mutant SV5F sequence, the SV5F-containing fragment was excised by NheI/BamHI digestion and inserted into the NheI/BamHI-digested original starting plasmid (pCMV-SV5F-WT-I-zGFP; SEQ ID NO: 718) to eliminate the risk of any inadvertent changes to the remainder of the plasmid during the mutagenesis procedure. Exemplary generated constructs containing SV5F mutants are described in Example 6.

TABLE 21
Mutagenesis Primers for SV5F Mutants

| | Gene | | | | |
|---|---|---|---|---|---|
| SV5F | Product | Protein | | Mutagenesis Primer | Primer |
| Mutant | SEQ ID NO | SEQ ID NO | Primer | Sequence | SEQ ID NO |
| G105A | 84 | 45 | forward | 5′ GGAGATTTGCTGCAGT | 260 |
| | | | | TGTGATTGGG 3′ | |
| | | | reverse | 5′ CCCAATCACAACTGCA | 261 |
| | | | | G CAAATCTCC 3′ | |
| G109A | 85 | 46 | forward | 5′ CTGGAGTTGTGATTGC | 262 |
| | | | | CCTGGCTGCCCTG 3′ | |
| | | | reverse | 5′ AGGGCAGCCAGGGCAA | 263 |
| | | | | TCACAACTCCAGC 3′ | |
| G114A | 86 | 47 | forward | 5′ GGGCTGGCTGCCCTGG | 264 |
| | | | | CTGTGGCTACAGCAGCA | |
| | | | | C 3′ | |
| | | | reverse | 5′ GTGCTGCTGTAGCCACA | 265 |
| | | | | GCCAGGGCAGCCAGCCC | |
| | | | | 3′ | |
| G105A/ | 87 | 48 | forward | 5′ GAGAAGGAGATTTGCT | 266 |
| G109A | | | | GCAGTTGTGATTGCCCTG | |
| | | | | GCTGCCCTGG 3′ | |
| | | | reverse | 5′ CCAGGGCAGCCAGGGC | 267 |
| | | | | AATCACAACTGCAGCAA | |
| | | | | ATCTCCTTCTC 3′ | |
| G105A/ | 88 | 49 | forward | 5′ GAGAAGGAGATTTGCT | 268 |
| G114A | | | | GCAGTTGTGATTGGGCTG | |
| | | | | GCTGCCCTGGCTGTGGCT | |
| | | | | ACAGCAGC 3′ | |
| | | | reverse | 5′ GCTGCTGTAGCCACAG | 269 |
| | | | | CCAGGGCAGCCAGCCCA | |
| | | | | ATCACAACTGCAGCAAA | |
| | | | | TCTCCTTCTC 3′ | |
| G109A/ | 89 | 50 | forward | 5′ GCTGGAGTTGTGATTG | 270 |
| G114A | | | | CCCTGGCTGCCCTGGCTG | |
| | | | | TGGCTACAGCAGC 3′ | |
| | | | reverse | 5′ GCTGCTGTAGCCACAG | 271 |
| | | | | CCAGGGCAGCCAGGGCA | |
| | | | | ATCACAACTCCAGC 3′ | |
| G105A/ | 90 | 51 | forward | 5′ GAGAAGGAGATTTGCT | 272 |
| G109A/ | | | | GCAGTTGTGATTGCCCTG | |
| G114A | | | | GCTGCCCTGGCTGTGGCT | |
| | | | | ACAGCAGC 3′ | |
| | | | reverse | 5′ GCTGCTGTAGCCACAG | 273 |
| | | | | CCAGGGCAGCCAGGGCA | |
| | | | | ATCACAACTGCAGCAAA | |
| | | | | TCTCCTTCTC 3′ | |

### Example 5

### Synthesis and Generation of Backbone Constructs

[0601] A. pIRES-EGFP Backbone

[0602] The commercially available pIRES2-EGFP vector construct (Clontech; SEQ ID NO: 1) was used as a primary backbone scaffold for the construction of various further backbone constructs. For use, the pIRES-EGFP construct was synthetically generated. Genes and DNA fragments, flanked by endonuclease recognition sequences, were synthesized by performing PCR with overlapping synthetic oligonucleotides as described above. The scaffold vector and synthesized fragments were then digested with the appropriate restriction endonuclease enzymes, and the fragments were ligated into the recipient vector with T4 DNA ligase. The recognition sites of the restriction endonucleases used to generate the various backbone constructs are set forth in Table 22 below.

TABLE 22
Restriction Endonuclease Recognition Sequences

| Restriction | | Recognition Site | SEQ ID |
|---|---|---|---|
| Enzyme | Recognition Site | After Cut | NO: |
| AseI | ...ATTAAT... | ...AT TAAT... | 550 |
| | ...TAATTA... | ... TAAT TA ... | |
| BamHI | ...GGATCC... | ...G GATCC... | 551 |
| | ...CCTAGG... | ...CCTAG G | |
| BglII | ...AGATCT... | ...A GATCT... | 552 |
| | ...TCTAGA... | ...TCTAG A... | |
| BspHI | ...TCATGA... | ...T CATGA... | 553 |
| | ...AGTACT... | ...AGTAC T... | |
| BstXI | ...CCANNNNNNTGG... | ...CCANNNNN NTGG... | 554 |
| | ...GGTNNNNNNACC... | ...GGTN NNNNNACC... | |
| NheI | ...GCTAGC... | ...G CTAGC... | 555 |
| | ...CGATCG... | ...CGATC G... | |
| NotI | ...GCGGCCGC... | ...GC GGCCGC... | 556 |
| | ...CGCCGGCG... | ...CGCCGG CO... | |
| Pact | ...TTAATTAA... | ...TTAAT TAA... | 557 |
| | ...AATTAATT... | ...AAT TAATT... | |
| PflFI | ...GACNNNGTC... | ...GACN NNGTC... | 558 |
| | ...CTGNNNCAG... | ...CTGNN NCAG... | |
| SexAI | ...ACCWGGT... | ...A CCWGGT... | 559 |
| | ...TGGWCCA... | ...TGGWCC A... | |
| XbaI | ...TCTAGA... | ...T CTAGA... | 560 |
| | ...TCTAGA... | ...TCTAG A... | |

[0603] Exemplary primary backbone constructs that were generated are set forth in Table 23 below.

TABLE 23

| | | | | | | | SEQ |
|---|---|---|---|---|---|---|---|
| Construct | | | | | polyA | SV40 | ID |
| name (s) | Promoter | 1^{st} gene | IRES | 2^{nd} gene | signal | ori^{a} | NO. |
| pIRES2-zGFP | CMV | — | + | zGFP | SV40 | o | 694 |
| pC-T-I-EGFP | CMV | TAg | + | EGFP | SV40 | o | 695 |
| pC-T(ss)-I-EGFP | CMV | TAg(ss) | + | EGFP | SV40 | o | 696 |
| (ss = redundant | | | | | | | |
| NotI and BstXI | | | | | | | |
| sites removed) | | | | | | | |
| pC-T(ss)-I-zGFP | CMV | TAg(ss) | + | zGFP | SV40 | o | 697 |
| pIRES2-SVT(wt) | CMV | — | + | TAg | SV40 | o | 698 |
| (pC-I-T) | | | | | | | |
| pCzGFP-I-T | CMV | zGFP | + | TAg | SV40 | o | 699 |

### B. Intermediate 1 Backbone Construct

[0604] To generate the Intermediate 1 backbone construct, the original Kan/NeoR gene (SEQ ID NO: 105) in the pIRES2-EGFP vector was replaced with a synthesized, CpG free, human codon optimized Kan/NeoR transcription unit. To this end, a DNA fragment was generated containing a CpG-free, human optimized Kan/NeoR transcription unit set forth in SEQ ID NO: 106, containing 1) a bacterial promoter set forth in SEQ ID NO: 107, corresponding to nucleotides 28-56 of SEQ ID NO:106, 2) a cDNA encoding the Kan/NeoR gene (SEQ ID NO: 109), corresponding to nucleotides 190-984 of the transcription unit of SEQ ID NO: 106, and 3) a synthetic polyadenylation (pA) signal (SEQ ID NO: 190), corresponding to nucleotides 985-1134 of SEQ ID NO: 106. Restriction recognition sequences for NotI, SexAI, and PacI were included at the 5′ end of the fragment, and the restriction sites for Pf1FI, Bg1II, and BspH1 were included at the 3′ end of the fragment. A variant fragment was also generated, substituting a variant of the Kan/NeoR gene set forth in SEQ ID NO: 108 for that encoded by SEQ ID NO: 109. The Kan/NeoR protein encoded by SEQ ID NO: 108 and 109 is the same as that encoded by the original, unmodified Kan/NeoR gene (SEQ ID NO: 105) and is set forth in SEQ ID NO: 110. Following digestion of the recipient pIRES2-EGFP vector and the synthesized fragment with NotI/BspHI, the digested fragment was inserted into the vector by standard procedures. The nucleotide sequence of the intermediate 1 backbone construct is set forth in SEQ ID NO: 2. The features of the Intermediate 1 backbone construct is set forth in FIG. 3A.

[0605] C. Intermediate 2 Backbone Construct

[0606] The Intermediate 2 backbone construct was generated by inserting a synthetic DNA fragment containing a synthetic pA signal for EGFP and the SV40 early promoter and origin into the Intermediate 1 backbone construct between the unique NotI and PacI restriction sites present in the synthetic fragment introduced into the pIRES-EGFP vector described in part A above. The synthetic PA signal for EGFP is set forth in SEQ ID NO: 196, and was designed to contain a 5′ NotI sequence (corresponding to nucleotides 1-8), an XbaI sequence (corresponding to nucleotides 12-17), and a 3′ SexAI sequence (corresponding to nucleotides 259-266). The synthetic SV40 early promoter/origin of replication is set forth in SEQ ID NO: 120, and was designed to contain a 5′ SexAI sequence (corresponding to nucleotides 1-8) and a 3′ PacI sequence (corresponding to nucleotides 149-158). The two synthetic constructs were joined by cutting and ligation at the SexAI sequence using standard procedures. The sequence of the resulting synthesized fragment is set forth in SEQ ID NO: 195, which contains a 5′ NotI sequence (corresponding to nucleotides 1-8) and a 3′ PacI sequence (corresponding to nucleotides 408-416.) Following digestion of the recipient backbone construct, Intermediate 1 vector, and the synthesized fragment with NotI/PacI, the digested fragment was inserted into the vector by standard procedures. The nucleotide sequence of the Intermediate 2 backbone construct is set forth in SEQ ID NO: 3. The features of the intermediate 2 backbone construct are set forth in FIG. 3B.

[0607] D. Intermediate 3 Backbone Construct (BB2)

[0608] The Intermediate 3 backbone construct was designed to contain a newly synthesized pUC origin, and also to temporarily remove the CMV promoter and a redundant Bg1II site. This was accomplished by generating a synthetic pUC origin with flanking Pf1FI-BamHI restriction sites for ligation into the Intermediate 2 backbone construct. The synthetic pUC origin region is set forth in SEQ ID NO: 121, and was designed to contain a 5′ Pf1FI sequence (corresponding to nucleotides 1-9), a 5′ Bg1II restriction site (corresponding to nucleotides 12-17), a 3′ AseI restriction site (corresponding to nucleotides 662-667), a 3′ NheI restriction site (corresponding to nucleotides 671-676), and a 3′ BamHI restriction site (corresponding to nucleotides 680-685). Following digestion of the recipient backbone construct Intermediate 2 vector and the synthesized fragment with Pf1FI and BamHI, the digested fragment was inserted into the vector by standard procedures. Digesting the Intermediate 2 vector with Pf1FI/BamHI removed the CMV promoter and the multiple cloning site, which included a unique Bg1II restriction site (corresponding to nucleotides 609-615 of SEQ ID NO: 3). Inserting the synthesized fragment introduced a new Bg1II restriction site and added back NheI and BamHI cloning sites. The nucleotide sequence of the Intermediate 3 backbone construct, which was designated BB2, is set forth in SEQ ID NO: 4. The features of the intermediate 3 backbone construct are set forth in FIG. 3C.

[0609] E. Intermediate 4 Backbone Construct

[0610] The Intermediate 4 backbone construct was designed to contain an additional transcription unit using the unique Pf1FI-Bg1II sites in the Intermediate 3 backbone construct. The transcription unit (SEQ ID NO: 497) was designed to contain 1) a synthetic cell-cycle dependent promoter that is a 110 base pair version of the E2F1 promoter (set forth in SEQ ID NO: 505, including a 5′ Pf1FI sequence corresponding to nucleotides 1-109), 2) a synthetic CpG-free, human condon-optimized HSV1-TK gene (SEQ ID NO: 499), and 3) a synthetic pA sequence (SEQ ID NO: 193, followed by a 3′ Bg1II sequence corresponding to nucleotides 151-156). The sequence of the resulting synthesized fragment is set forth in SEQ ID NO: 497, which contains a 5′ Pf1FI sequence (corresponding to nucleotides 1-9) and a 3′ Bg1II sequence (corresponding to nucleotides 1399-1404). Following digestion of the recipient backbone construct, Intermediate 3 vector, and the synthesized fragment with Pf1FI and Bg1II, the digested fragment was inserted into the vector by standard procedures. The nucleotide sequence of the Intermediate 4 backbone construct is set forth in SEQ ID NO: 5. The features of the Intermediate 4 backbone construct are set forth in FIG. 3D.

[0611] The intermediate 4 backbone construct contains AseI and NheI restriction sites for the insertion of a promoter of choice, NheI and BamHI restriction sites for the insertion of a gene of interest (first gene position), an EMCV IRES, followed by a gene sequence encoding EGFP between the BstXI and NotI restriction sites (second gene position), a synthetic pA signal 3′ of the second gene position, an SV40 early promoter and ori, a bacterial promoter, a human optimized CpG-free Kan-NeoR gene, a synthetic pA for the Kan-NeoR gene, a synthetic cell cycle-dependent conditional promoter controlling the expression of a synthetic human optimized CpG-free HSV1-TK gene, a synthetic pA sequence, and an unmodified pUC ori. Exemplary customized constructs using the Intermediate backbone are set forth in FIGS. 3E and 3F and are further described in Example 6.

[0612] F. BB3 Backbone Constructs

[0613] The BB3 backbone construct was generated by 1) excising the EGFP gene between the BstXI and NotI restriction sites and 2) inserting a transcription unit (SEQ ID NO: 734), encoding a reporter protein, red fluorescent protein (RFP) (SEQ: 732), between the Pf1FI and Bg1II restriction sites of Intermediate 3. The transcription unit contained, a promoter nested between Pf1FI and StuI restriction site (nucleotides 1-95 of SEQ ID NO: 734), a CpG-free, human codon-optimized RFP coding sequence (zRFP) (SEQ ID NO: 731) nested between flanking StuI and EcoRI restriction sites (SEQ ID NO: 733 or nucleotides 90-982 of SEQ ID NO: 731) and a polyadenylation sequence between EcoRI and Bg1II restriction sites (nucleotides 977-1138 of SEQ ID NO: 734). The BB3 backbone construct contains AseI and NheI restriction sites for the insertion of a promoter of choice, NheI and BamHI restriction sites for the insertion of a gene of interest (first gene position), an EMCV IRES, followed BstXI and NotI restriction sites for the insertion of a second gene of interest (second gene position), a synthetic pA signal 3′ of the second gene position, an SV40 early promoter and ori, a bacterial promoter, a human optimized CpG-free Kan-NeoR gene, a synthetic pA for the Kan-NeoR gene, a promoter for controlling the expression of a synthetic human optimized CpG-free RFP gene (zRFP), a synthetic pA sequence, and an unmodified pUC ori.

[0614] Functional BB3 constructs were generated by inserting a promoter, and two genes of interest in the specified locations (see Example 6). An exemplary BB3 construct pCzGFP-I-T-BB3 (SEQ ID NO: 607) contained CpG-free, human codon-optimized EGFP in the first position, and SV40-Tag in the second position, under the regulation of a CMV promoter. These and other features of pCzGFP-I-T-BB3 (SEQ ID NO: 607) are depicted in FIG. 3G.

[0615] Non-replicating dSV control constructs were also generated by inserting a synthetic plasmid, set forth in SEQ ID NO: 111, into the SexAI/PacI restriction site of the BB3 backbone. These dSV vectors contained the SV40pA, but no SV40 core ori. The features of an exemplary non-replicating dSV vector, pCzGFP-I-T-dSV (SEQ ID NO: 608), corresponding to pCzGFP-I-T-BB3 (SEQ ID NO: 607) described above, are depicted in FIG. 3H.

[0616] G. BB4 Backbone Constructs

[0617] BB4 backbone construct was generated from the BB3 construct pCzGFP-I-T-BB3 (SEQ ID NO: 607; see Example 6), which contained human codon optimized GFP in the first gene position and SV40-TAg in the second position. To generate BB4 constructs, the synthetic pA signal immediately 3′ of the second gene position and SV40 promoter/ori were replaced by a synthetic fragment, set forth in SEQ ID NO: 201, generated by Blue Heron Biotechnology Inc. (Bothell, Wash.). The new synthetic fragment contained a 5′ NotI restriction site followed by an SV40 pA signal (SV40pA), a BB3 format modified SV40 ori with a wild-type core SV40 ori, and a 3′ PacI restriction site. This fragment was ligated into a BB3 vector following NotI/PacI digestion to remove the synthetic polyadenylation sequence, and SV40 ori. The resultant plasmid was designated pCzGFP-I-T-BB4, and the sequence is set forth in SEQ ID NO: 719. Non-replicating dSV4-1 and dSV4-2 control constructs were also generated by inserting synthetic plasmids (Blue Heron Biotechnology Inc.), set forth in SEQ ID NOS: 199 and 198, respectively, into the NotI/PacI restriction sites of pCzGFP-I-T-BB3 (SEQ ID NO: 607). These dSV vectors contained the SV40pA, but no SV40 core on and were designated pCzGFP-I-T-dSV4-1 (SEQ ID NO: 720) and pCzGFP-I-T-dSV4-2 (SEQ ID NO: 721). The features of pCzGFP-I-T-BB4 and pCzGFP-I-T-dSV4-2 are set forth in FIGS. 31 and J, respectively. Generated BB4 constructs are set forth in the Table below:

TABLE 24

| | | | | | | | |
|---|---|---|---|---|---|---|---|
| | | | | | | | SEQ |
| Construct | | | | | polyA | SV40 | ID |
| name (s) | Promoter | 1^{st} gene | IRES | 2^{nd} gene | signal | ori^{a} | NO. |

Backbone 4 (BB4) Constructs

| | | | | | | | |
|---|---|---|---|---|---|---|---|
| pCzGFP-I-T-BB4 | CMV | zGFP | + | TAg | SV40 | + | 719 |
| pCzGFP-I-T-dSV4-1 | CMV | zGFP | + | TAg | SV40 | − | 720 |
| pCzGFP-I-T-dSV4-2 | CMV | zGFP | + | TAg | SV40 | − | 721 |

[0618] H. BB5 Constructs

[0619] BB5 backbone construct was generated from the BB3 construct pCzGFP-I-T-BB3 (SEQ ID NO: 607; see Example 6). The BB5 backbone construct was created by inserting a synthetic fragment, set forth in SEQ ID NO: 200, containing 5′ NotI and XbaI restriction sites followed by the bovine growth hormone polyadenylation signal (BGHpA) followed by a BB3 format modified SV40 ori and 3′ PacI restriction site, into the NotI/PacI-digested pCzGFP-I-T-BB3 plasmid. The resultant vector was designated pCzGFP-I-T-BB5; the sequence is set forth in SEQ ID NO: 726, and the features are set forth in FIG. 3K and the Table below.

TABLE 25

| | | | | | | | |
|---|---|---|---|---|---|---|---|
| | | | | | | | SEQ |
| Construct | | | | | polyA | SV40 | ID |
| name (s) | Promoter | 1^{st} gene | IRES | 2^{nd} gene | signal | ori^{a} | NO. |

Backbone 5 (BB5) Constructs

| | | | | | | | |
|---|---|---|---|---|---|---|---|
| pCzG-I-T-BB5 | CMV | zGFP | + | TAg | BGH | + | 726 |

### Example 6

### Summary of Generated Experimental Constructs

[0620] Using the backbone construct generated in Example 5, and the genes synthesized in Examples 1-4, several constructs were generated that were used in subsequent examples. The vectors were autonomously replicating plasmids (ARPs) containing an SV40 TAg and an SV40 ori. In some cases, plasmids lacking the SV40 promoter/ori, and thus incapable of SV40-TAg-mediated replication, were also generated. Variable components of the constructs included the promoter, inserted between the AseI and NheI restriction sites of the backbone construct; the first expressed gene, inserted between the NheI and BamHI restriction sites; the internal entry ribosomal site (IRES); the second expressed gene, inserted between the BstXI and NotI restriction sites; and the SV40 origin of replication (ori). Tables 26 and 27 summarize the generated vector. The nomenclature used for referring to the vectors is designated plasmid (p), promoter type (e.g. CMV or C), first gene of interest (e.g. GFP or G), IRES (I) and second gene of interest (e.g. SV40 TAg or T). If a component or element of the construct was synthesized to be human codon-optimized and CpG free it is represented by a preceding “z”.

[0621] A. Experimental Constructs Derived from pIRES2-GFP

[0622] pIRES2-GFP served as the backbone construct for the generation of initial fusogenic constructs (SEQ ID NOS:713-718) which were used to evaluate the fusogenic activities of various fusogenic protein candidates. These initial fusogenic constructs were generated by the insertion of NheI/BamHI-flanked synthetic fusogenic protein cDNAs into the NheI-BamHI sites of pIRES2-zGFP (SEQ ID NO: 694). These constructs expressed both the fusogenic cDNA and zGFP under the regulation of the CMV promoter. These vectors were designated pC-F-I-zG, where “F” is a fusogenic cDNA (e.g., GALV, ARVp10, RRVp14, BRVp15 etc). Resultant vectors were: pCzARVp10-IzG (SEQ ID NO: 715), pCzRRVp14-I-zG (SEQ ID NO: 716), pCzBRVp15-I-zG (SEQ ID NO: 717), pCzGALV-I-zG (SEQ ID NO: 713), pCzVSVG-I-zG (SEQ ID NO: 714), pCzSV5F-I-zG (SEQ ID NO: 718). These constructs were used in the initial evaluation of fusogenic activity of fusogenic protein candidates, as the GFP co-expression facilitated detection and assessment of multinucleated syncytia.

[0623] pIRES2-GFP also served as the backbone construct for generation of experimental constructs containing an SV40 Large T Antigen (Tag). A fragment containing CpG-free, human codon-optimized SV-40 Large T Antigen (TAg), set forth in SEQ ID NO: 563, was generated by overlapping PCR and oligonucleotide hybridization as described in Example 2 above. The fragment contained the synthetic TAg cDNA nested between 5′ NheI and BstXI restrictions sites and 3′ NotI and BamHI restriction sites. Flanking the TAg cDNA with multiple sets of restriction sites allowed for TAg insertion into either the first or second gene positions of any of the backbone vectors described above. The TAg synthetic fragment was subcloned into the NheI/BamHI sites of pIRES2-EGFP (SEQ ID NO: 1) to generate the backbone and reporter construct pCMV-SV40TAg-I-EGFP (pC-T-I-EGFP), set forth in SEQ ID NO: 695. The SV40 TAg cDNA was also digested with BstXI/NotI and subcloned into pIRES2-EGFP (SEQ ID NO: 1), replacing the coding sequence for EGFP. This procedure resulted in the pIRES2-SV40TAg (pC-I-T) backbone vector set forth in SEQ ID NO: 698. A reporter construct, pCzGFP-I-T (SEQ ID NO: 699), was generated by inserting a synthetic CpG-free, human codon-optimized EGFP (zGFP; SEQ ID NO: 545) into the first gene position of the pC-I-T vector, following NheI/BamHI digestion of the synthesized zGFP construct and pC-I-T vector.

[0624] B. Experimental Constructs Derived from Intermediate 4 Backbone Construct

[0625] To generate specific constructs derived from the Intermediate 4 backbone, the backbone construct was digested with the appropriate restriction endonucleases followed by ligation of the digested backbone with the new features flanked by the same restriction sites. For example, an Intermediate 4-derived construct was generated to contain a CMV promoter, a gene encoding a fusogenic protein (SV5F protein) in the first position and SV40-TAg in the second position (see FIG. 3E). The CMV promoter was inserted between the AseI and NheI restriction sites; the first gene of interest, SV5F, was inserted into the first gene position between the NheI and BamHI restriction sites; and SV40 TAg was inserted into the second gene position between the BstXI and NotI restriction sites. A further exemplary vector derived from Intermediate 4 was generated to confer cell cycle-dependent gene expression by replacing the CMV promoter with a cell cycle-dependent promoter (CCD) between the AseI and NheI restriction sites using standard procedures. An exemplary plasmid map, depicting a such a bicistronic construct with the gene for a fusogenic protein (SV5F protein) in the first gene position and SV40-TAg in the second position, under the regulation of a CCD promoter is set forth in FIG. 3F.

[0626] C. Experimental Constructs Derived from BB3 Backbone Construct

[0627] Customized BB3 vectors were generated by digesting the backbone construct with the appropriate restriction endonucleases followed by ligation of the digested backbone with the new features containing the same restriction sites. Specifically, a promoter sequence of interest was inserted between the AseI/NheI restriction sites and any two genes of interest were inserted into the first and second gene positions, in either orientation, between the NheI/BamHI and BstXI/NotI restriction sites, respectively. Retention of the restriction sites permitted replacement of the feature at a later time point if so desired. Prior to use, the sequences of the genes of interest located in the first and second positions were confirmed by sequencing. For bicistronic constructs containing a CMV promoter, the gene of interest located in the first position, 3′ of the CMV promoter, was sequenced using a forward sequencing primer which anneals to a sequence within the CMV, set forth in SEQ ID NO: 462 (5′-GTAGGCGTGTACGGTGGGAGG-3′) and a reverse primer which anneals to a sequence within the IRES element, set forth in SEQ ID NO: 464 (5′-CATATAGACAAACGCACACC-3′). The gene in the second location was sequenced using a forward primer which recognized a sequence within the IRES element, set forth in SEQ ID NO: 463 (5′-GAGGTTAAAAAAACGTCTAGG-3′) and a reverse primer which recognizes a sequence within the SV40 pA sequence, set forth in SEQ ID NO: 465 (5′-TTTCAGGTTCAGGGGGAGGTG-3′).

[0628] For example, a BB3-derived vector was generated that contained human codon optimized GFP in the first gene position and SV40-TAg in the second position, which was designated pCzGFP-I-T-BB3 (SEQ ID NO: 607; also see FIG. 3G). The pCzGFP-I-T-BB3 construct was used to subclone in SV40 TAg mutant cDNAs into the second gene position between the BstXI and NotI restriction sites, to create test vectors, set forth in SEQ ID NOS: 616-646 (see Example 5). FIG. 3L depicts a vector map of an exemplary BB3-derived construct containing a CMV promoter, a fusogenic gene encoding GALV in the first position and SV40 Tag in the second position (SEQ ID NO: 653).

[0629] Restriction of expression and replication of bicistronic constructs to tumor cells was achieved by inserting a cell cycle-dependent promoter in place of the CMV promoter in a AseI/NheI-digested BB3 construct. Examples of constructs with cell cycle dependent expression are set forth in SEQ ID NOS: 666-676.

[0630] A summary of exemplary generated BB3-derived vectors is set forth in Table 26.

[0631] D. Experimental Constructs Derived from Intermediate BB4 Construct

[0632] Customized BB4 vectors were generated by digesting the backbone construct with the appropriate restriction endonucleases followed by ligation of the digested backbone with the new features containing the same restriction sites. BB4-derived constructs were generated from the backbone construct set forth in SEQ ID NO:719. The constructs were generated by replacing zGFP sequence in the first gene of interest site separated by NheI and BamHI restriction sites with another gene of interest, such as genes encoding fusogenic proteins. A summary of exemplary generated BB4-derived vectors is set forth in Table 26.

[0633] E. Delta-SV40 Ori (dSV) Constructs

[0634] As a negative control, plasmids lacking the SV40 promoter/ori, and thus incapable of SV40-TAg-mediated replication, were also generated (designated dSV; also see Example 5). These non-replicating plasmids (nRPs) were generated by replacing the SV40 ori of any backbone construct described above or other construct with a synthetic linker (ACCTGGTTAGGAGGGGAGGAGGATTAATTAA; SEQ ID NO:111) containing flanking SexAI and PacI restriction sites, and were designated dSV (delta SV40 ori). The presence or lack of the SV40 ori for the BB3 and dSV constructs was confirmed by sequencing using a reverse sequencing primer that binds within the synthetic KanR cDNA. A summary of exemplary generated dSV-derived vectors is set forth in Table 26.

TABLE 26
Summary of Constructs

| | | | | | | | |
|---|---|---|---|---|---|---|---|
| | | | | | | | SEQ |
| Construct | | | | | polyA | SV40 | ID |
| name (s) | Promoter | 1^{st} gene | IRES | 2^{nd} gene | signal | ori^{a} | NO. |

BB5 BACKBONE CONSTRUCTS
Reporter Constructs

| | | | | | | | |
|---|---|---|---|---|---|---|---|
| pCMV-GFP-IRES-LTAg- | CMV | zGFP | + | TAg | syn | + | 607 |
| WT BB3 | | | | | | | |
| (pCzGFP-I-T-BB3) | | | | | | | |
| (pCzGFP-I-T(WT)-BB3) | | | | | | | |
| pCMV-GFP-IRES-LTAg- | CMV | zGFP | + | TAg | syn | − | 608 |
| WT BB3 | | | | | | | |
| (pCzGFP-I-T-dSV) | | | | | | | |
| (pCzGFP-I-T(WT)-dSV) | | | | | | | |
| pCzGFP-delta-I-T-BB3 | CMV | zGFP | − | — | syn | − | 609 |
| pCzGFP-I-nT-BB3 | CMV | zGFP | + | native TAg^{b} | syn | + | 610 |
| pC-mKate2-I-T-BB3 | CMV | mKate2 | + | TAg | syn | + | 611 |
| pC-Luc-I-T-BB3 | CMV | Luciferase | + | TAg | syn | + | 612 |
| pC-Luc-I-T-dSV | CMV | Luciferase | + | TAg | syn | − | 613 |
| pC-Bgal-I-T-BB3 | CMV | Beta- | + | TAg | syn | + | 614 |
| | | galactosidase | | | | | |
| pC-Bgal-I-T-dSV | CMV | Beta- | + | TAg | syn | − | 615 |
| | | galactosidase | | | | | |
| pC-SEAP-I-T-BB3 | CMV | SEAP | + | TAg | syn | + | 677 |

TAg Mutant Constructs

| | | | | | | | |
|---|---|---|---|---|---|---|---|
| pCzGFP-I-T(L19F)-BB3 | CMV | zGFP | + | TAg (L19F) | syn | + | 616 |
| pCzGFP-I- | CMV | zGFP | + | TAg (P28S) | syn | + | 617 |
| T(P28S)-BB3 | | | | | | | |
| pCzGFP-I- | CMV | zGFP | + | TAg (L103P) | syn | + | 618 |
| T(L103P)-BB3 | | | | | | | |
| pCzGFP-I- | CMV | zGFP | + | TAg (C105A) | syn | + | 619 |
| T(C105A)-BB3 | | | | | | | |
| pCzGFP-I- | CMV | zGFP | + | TAg (E107L) | syn | + | 620 |
| T(E107L)-BB3 | | | | | | | |
| pCzGFP-I- | CMV | zGFP | + | TAg (E107K) | syn | + | 621 |
| T(E107K)-BB3 | | | | | | | |
| pCzGFP-I- | CMV | zGFP | + | TAg (E108L) | syn | + | 622 |
| T(E108L)-BB3 | | | | | | | |
| pCzGFP-I- | CMV | zGFP | + | TAg (S112N) | syn | + | 623 |
| T(S112N)-BB3 | | | | | | | |
| pCzGFP-I- | CMV | zGFP | + | TAg (S189N) | syn | + | 624 |
| T(S189N)-BB3 | | | | | | | |
| pCzGFP-I- | CMV | zGFP | + | TAg (D402R) | syn | + | 625 |
| T(D402R)-BB3 | | | | | | | |
| pCzGFP-I- | CMV | zGFP | + | TAg (P453S) | syn | + | 626 |
| T(P453S)-BB3 | | | | | | | |
| pCzGFP-I- | CMV | zGFP | + | TAg (V585R) | syn | + | 627 |
| T(V585R)-BB3 | | | | | | | |
| pCzGFP-I- | CMV | zGFP | + | TAg (D604R) | syn | + | 628 |
| T(D604R)-BB3 | | | | | | | |
| pCzGFP-I- | CMV | zGFP | + | TAg | syn | + | 629 |
| T(L103P/C105A)- | | | | (L103P/C105A) | | | |
| BB3 | | | | | | | |
| pCzGFP-I- | CMV | zGFP | + | TAg | syn | + | 630 |
| T(L103P/E107L)- | | | | (L103P/E107L) | | | |
| BB3 | | | | | | | |
| pCzGFP-I- | CMV | zGFP | + | TAg | syn | + | 631 |
| T(L103P/E108L)- | | | | (L103P/E108L) | | | |
| BB3 | | | | | | | |
| pCzGFP-I- | CMV | zGFP | + | TAg | syn | + | 632 |
| T(C105A/E107L)- | | | | (C105A/E107L) | | | |
| BB3 | | | | | | | |
| pCzGFP-I- | CMV | zGFP | + | TAg | syn | + | 633 |
| T(C105A/E108L)- | | | | (C105A/E108L) | | | |
| BB3 | | | | | | | |
| pCzGFP-I- | CMV | zGFP | + | TAg | syn | + | 634 |
| T(E107L/E108L)- | | | | (E107L/E108L) | | | |
| BB3 | | | | | | | |
| pCzGFP-I- | CMV | zGFP | + | TAg | syn | + | 635 |
| T(C105A/E107L/ | | | | (C105A/E107L/ | | | |
| E108L)-BB3 | | | | E108L) | | | |
| pCzGFP-I- | CMV | zGFP | + | TAg | syn | + | 636 |
| T(L103P/E107L/ | | | | (L103P/E107L/ | | | |
| E108L)-BB3 | | | | E108L) | | | |
| pCzGFP-I- | CMV | zGFP | + | TAg | syn | + | 637 |
| T(L103P/C105A/ | | | | (L103P/CA105A/ | | | |
| E107L/E108L)- | | | | E107L/E108L) | | | |
| BB3 | | | | | | | |
| pCzG-I- | CMV | zGFP | + | TAg | syn | + | 638 |
| T(E107L/E108L/ | | | | (E107L/E108L/ | | | |
| S112N)-BB3 | | | | S112N) | | | |
| pCzG-I- | CMV | zGFP | + | TAg | syn | + | 639 |
| T(C105A/E107L/ | | | | (C105A/E107L/ | | | |
| E108L/S112N)-BB3 | | | | E108L/S112N) | | | |
| pCzG-I- | CMV | zGFP | + | TAg | syn | + | 640 |
| T(C105A/E108L/ | | | | (C105A/E108L/ | | | |
| S112N)-BB3 | | | | S112N) | | | |
| pCzG-I-T(C105A/ | CMV | zGFP | + | TAg | syn | + | 641 |
| E107L/S112N)-BB3 | | | | (C105A/E107L/ | | | |
| | | | | S112N) | | | |
| pCzG-I-T(C105A/ | CMV | zGFP | + | TAg | syn | + | 642 |
| S112N)-BB3 | | | | (C105A/S112N) | | | |
| pCzG-I-T(L103P/ | CMV | zGFP | + | TAg | syn | + | 643 |
| E107K)-BB3 | | | | (L103P/E107K) | | | |
| pCzG-I- | CMV | zGFP | + | TAg | syn | + | 644 |
| T(L105A/E107K)- | | | | (L105A/E107K) | | | |
| BB3 | | | | | | | |
| pCzGFP-I- | CMV | zGFP | + | TAg | syn | + | 645 |
| T(Δ366-370)- | | | | (Δ366-370) | | | |
| BB3 | | | | | | | |
| pCzGFP-I- | CMV | zGFP | + | TAg | syn | + | 646 |
| T (Δ434-444)- | | | | (Δ434-444) | | | |
| BB3 | | | | | | | |

Fusogenic Constructs

| | | | | | | | |
|---|---|---|---|---|---|---|---|
| pCzARVp10-I-T-BB3 | CMV | zARVp10 | + | TAg | syn | + | 647 |
| pCzARVp10-I-T-dSV | CMV | zARVp10 | + | TAg | syn | − | 648 |
| pCzRRVp14-I-T-BB3 | CMV | zRRVp14 | + | TAg | syn | + | 649 |
| pCzRRVp14-I-T-dSV | CMV | zRRVp14 | + | TAg | syn | − | 650 |
| pCzBRVp15-I-T-BB3 | CMV | zBRVp15 | + | TAg | syn | + | 651 |
| pCzBRVp15-I-T-dSV | CMV | zBRVp15 | + | TAg | syn | − | 652 |
| pCzGALV-I-T-BB3 | CMV | GALV | + | TAg | syn | + | 653 |
| pCzGALV-I-T-dSV | CMV | GALV | + | TAg | syn | − | 654 |
| pCzSV5F-I-T-BB3 | CMV | SV5F | + | TAg | syn | + | 655 |
| pCzSV5F-I-T-dSV | CMV | SV5F | + | TAg | syn | − | 656 |
| pCzVSVG-I-T-BB3 | CMV | VSVG | + | TAg | syn | + | 657 |
| pCzVSVG-I-T-dSV | CMV | VSVG | + | TAg | syn | − | 658 |

Enhanced Fusogenic Constructs

| | | | | | | | |
|---|---|---|---|---|---|---|---|
| pCzSV5F-I- | CMV | SV5F | + | TAg | syn | + | 659 |
| T(G105A)-BB3 | | (G105A) | | | | | |
| pCzSV5F-I- | CMV | SV5F | + | TAg | syn | + | 660 |
| T(G109A)-BB3 | | (G109A) | | | | | |
| pCzSV5F-I- | CMV | SV5F | + | TAg | syn | + | 661 |
| T(G114A)-BB3 | | (G114A) | | | | | |
| pCzSV5F-I- | CMV | SV5F | + | TAg | syn | + | 662 |
| T(G105A/G109A)- | | (G105A/G109A) | | | | | |
| BB3 | | | | | | | |
| pCzSV5F-I- | CMV | SV5F | + | TAg | syn | + | 663 |
| T(G105A/G109A/ | | (G105A/G109A/ | | | | | |
| G114A)-BB3 | | G114A) | | | | | |

Pro-Drug Converting Enzyme Constructs

| | | | | | | | |
|---|---|---|---|---|---|---|---|
| pC-zCDase-I-T-BB3 | CMV | zCDase | + | TAg | syn | + | 664 |
| pC-zCDase-I-T-dSV | CMV | zCDase | + | TAg | syn | − | 665 |

Cell Cycle-Dependent Promoter Constructs

| | | | | | | | |
|---|---|---|---|---|---|---|---|
| pCMV/EF1-zGFP- | CMV | zGFP | + | TAg | syn | + | 666 |
| I-T-BB3 | enhancers/ | | | | | | |
| | EF1 | | | | | | |
| | promoter | | | | | | |
| pCMV/EF2-zGFP- | CMV | zGFP | + | TAg | syn | + | 667 |
| I-T-BB3 | enhancers/ | | | | | | |
| | EF2 tata- | | | | | | |
| | less | | | | | | |
| | promoter | | | | | | |
| pCMV/EF2 (ss)- | CMV | zGFP | + | TAg | syn | + | 668 |
| zGFP-I-T-BB3 | enhancers/ | | | | | | |
| | EF2 tata- | | | | | | |
| | less | | | | | | |
| | promoter | | | | | | |
| | (redundant | | | | | | |
| | BamHI site | | | | | | |
| | removed) | | | | | | |
| pCMV/EF2-zGFP-I-T | CMV | zGFP | + | TAg | syn | + | 669 |
| (L103P)-BB3 | enhancers/ | | | (L103P) | | | |
| | EF2 tata- | | | | | | |
| | less | | | | | | |
| | promoter | | | | | | |
| pCMV/EF2-zGFP-I-T | CMV | zGFP | + | TAg | syn | + | 670 |
| (C105A)-BB3 | enhancers/ | | | (C103A) | | | |
| | EF2 tata- | | | | | | |
| | less | | | | | | |
| | promoter | | | | | | |
| pCMV/EF2-zGFP-I-T | CMV | zGFP | + | TAg | syn | + | 671 |
| (E107K)-BB3 | enhancers/ | | | (E107K) | | | |
| | EF2 tata- | | | | | | |
| | less | | | | | | |
| | promoter | | | | | | |
| pCMV/EF2-zGFP-I-T | CMV | zGFP | + | TAg | syn | + | 672 |
| (L103P/C105A)-BB3 | enhancers/ | | | (L103P/C105A) | | | |
| | EF2 tata- | | | | | | |
| | less | | | | | | |
| | promoter | | | | | | |
| pCMV/EF2-zGFP-I-T | CMV | zGFP | + | TAg | syn | + | 673 |
| (L103P/E107K)-BB3 | enhancers/ | | | (L103P/E107K) | | | |
| | EF2 tata- | | | | | | |
| | less | | | | | | |
| | promoter | | | | | | |
| pCMV/EF2-zGFP-I-T | CMV | zGFP | + | TAg | syn | + | 674 |
| (C105A/E107K)-BB3 | enhancers/ | | | (C105A/E107K) | | | |
| | EF2 tata- | | | | | | |
| | less | | | | | | |
| | promoter | | | | | | |
| pCMV/EF1/E2F-zGFP- | CMV | zGFP | + | TAg | syn | + | 675 |
| I-T-BB3 | enhancers/ | | | | | | |
| | EF1 and | | | | | | |
| | tata-less | | | | | | |
| | E2F | | | | | | |
| | promoter | | | | | | |
| pCMV/int-zGFP-I- | CMV plus | zGFP | + | TAg | syn | + | 676 |
| T-BB3 | pCI intron | | | | | | |

Reverse Orientation Constructs

| | | | | | | | |
|---|---|---|---|---|---|---|---|
| pC-T-I-zGFP-BB3 | CMV | TAg | + | zGFP | syn | + | 689 |
| pC-T-I-zGFP-dSV | CMV | TAg | + | zGFP | syn | − | 690 |
| pC-T-I-Luc-BB3 | CMV | TAg | + | Luciferase | syn | + | 691 |
| pC-T-I-Luc-dSV | CMV | TAg | + | Luciferase | syn | − | 692 |
| pC-T-I-zGALV-BB3 | CMV | TAg | + | zGALV | syn | + | 693 |

pIRES2-EGFP-BASED CONSTRUCTS

| | | | | | | | |
|---|---|---|---|---|---|---|---|
| pCzSV5F-I-T | CMV | zSV5F | + | TAg | SV40 | o | 700 |
| pCzVSVG-I-T | CMV | zVSVG | + | TAg | SV40 | o | 701 |
| pCz ARVp10-I-T | CMV | zARVp10 | + | TAg | SV40 | o | 702 |
| pCz RRVp14-I-T | CMV | zRRVp14 | + | TAg | SV40 | o | 703 |
| pCz BRVp15-I-T | CMV | zBRVp15 | + | TAg | SV40 | o | 704 |
| pCzGALV-I-T | CMV | zGALV | + | TAg | SV40 | o | 705 |
| pCzGFP-I-T(E107L) | CMV | zGFP | + | TAg (E107L) | SV40 | o | 706 |
| pCzGFP-I- | CMV | zGFP | + | TAg | SV40 | o | 707 |
| T(E107L/D402R) | | | | (E107L/D402R) | | | |
| pCzGFP-I- | CMV | zGFP | + | TAg | SV40 | o | 708 |
| T(E107L/E108L) | | | | (E107L/E108L) | | | |
| pCzGFP-I- | CMV | zGFP | + | TAg | SV40 | o | 709 |
| T(E107L/E108L/ | | | | (E107L/E108L/ | | | |
| D402R) | | | | D402R) | | | |
| pCzGFP-I- | CMV | zGFP | + | TAg | SV40 | o | 710 |
| T(E107L/E108L/ | | | | (E107L/E108L/ | | | |
| D453S) | | | | D453S) | | | |
| pCzGFP-I- | CMV | zGFP | + | TAg | SV40 | o | 711 |
| T(E107L/E108L/ | | | | (E107L/E108L/ | | | |
| V585R) | | | | V585R) | | | |
| pCzGFP-I- | CMV | zGFP | + | TAg | SV40 | o | 712 |
| T(E107L/E108L/ | | | | (E107L/E108L/ | | | |
| D604R) | | | | D604R) | | | |
| pCzGALV-I-zG | CMV | zGALV | + | zGFP | SV40 | o | 713 |
| pCzVSVG-I-zG | CMV | zVSVG | + | zGFP | SV40 | o | 714 |
| pCz ARVp10-I-zG | CMV | zARVp10 | + | zGFP | SV40 | o | 715 |
| pCz RRVp14-I-zG | CMV | zRRVp14 | + | zGFP | SV40 | o | 716 |
| pCz BRVp15-I-zG | CMV | zBRVp15 | + | zGFP | SV40 | o | 717 |
| pCz SV5F-I-zG | CMV | zSV5F | + | zGFP | SV40 | o | 718 |

BACKBONE 4 (BB4) CONSTRUCTS

| | | | | | | | |
|---|---|---|---|---|---|---|---|
| pCzGALV-I-T-BB4 | CMV | zGALV | + | TAg | SV40 | + | 722 |
| pCzGALV-I-T-dSV4-1 | CMV | zGALV | + | TAg | SV40 | − | 723 |
| pCzCDase-I-T-BB4 | CMV | zCDase | + | TAg | SV40 | + | 724 |
| pCzCDase-I-T-dSV4 | CMV | zCDase | + | TAg | SV40 | − | 725 |

^{a}SV40 ori o: original, unmodified SV40 ori from pIRES2-EGFP (contains CpG)
^{b}native TAg is the unmodified SV40-T Ag gene sequence (not modified to remove CpG or optimized for human codon frequency)

[0635] F. Other Constructs

[0636] Other constructs were generated that contain additional internal promoters in addition to the IRES in order to regulate expression of the second gene independent of the first gene. Also, constructs were generated that contain a modified IRES sequence whereby a potentially redundant ATG start site for the gene in the 2^{nd} positions was removed. These constructs are set forth in Table 27.

TABLE 27
Other Constructs

| | | | | | | | | SEQ |
|---|---|---|---|---|---|---|---|---|
| Construct | | | Internal | | Internal | | SV40 | ID |
| name | Promoter | 1^{st} gene | Promoter | IRES | Promoter | 2^{nd} gene | ori | NO. |
| pC-T-I-RSV- | CMV | TAg | — | + | Reos | GALV | + | 727 |
| GALV-BB3 | | | | | sarcoma | | | |
| | | | | | virus | | | |
| | | | | | (RSV) | | | |
| pC-Luc-RSV-I-T-BB3 | CMV | Luciferase | Reos | + | — | TAg | + | 728 |
| | | | sarcoma | | | | | |
| | | | virus | | | | | |
| | | | (RSV) | | | | | |
| pCzG-1I-T-BB3 | CMV | zGFP | — | 1I^{a} | — | TAg | + | 729 |
| pCzG-1I-T-dSV | CMV | zGFP | — | 1I^{a} | — | TAg | − | 688 |

^{a}IRES mutant 1I: ATGG at 3′ end mutated to ATCC to remove potentially redundant ATG start site for gene in the 2^{nd} position

### Example 7

### Replication and Protein Expression in Human Embryonic Kidney (HEK) 293 Cells

[0637] In this example, gene expression and replication in HEK 293 cells was examined in cells transfected with the autonomous replicating vector (ARP) pCMV-GFP-IRES-LTAg-WT-BB3 (also called pCzGFP-I-T-BB3; set forth in SEQ ID NO: 607). Cells transfected with a control non-replicating vector (nRP) containing a deletion in the SV40 origin, designated pCMV-GFP-IRES-LT Ag-dSV (also called pCzGFP-I-T-dSV; set forth in SEQ ID NO: 608), also was examined. Reverse orientation plasmids also were tested.

### A. Gene Expression in HEK 293 Cells

[0638] HEK293 cells (American Type Culture Collection (ATCC), Manassas, Va.) were grown in DMEM media with 10% heat deactivated (55° C. for 1 hr) fetal bovine serum (Omega Scientific, Tarzana, Calif.). Cells were split 1:4 twice per week in order to maintain sub-confluent cultures. Cells were removed by brief (1 minute) trypsinization and a lack of SV40 LTAg expression was confirmed by Western blot.

[0639] 5×10⁵ HEK 293 cells/well were plated in a 6-well flat bottom tissue culture plate and transfected with 100 ng of pCzGFP-I-T-BB3 (SEQ ID NO: 607) or pCzGFP-I-T-dSV; SEQ ID NO: 608 using Lipofectamine 2000 (L2K), according to the manufacturer's instructions. To examine the effect of gene position, within the bicistronic vector, on gene expression, ARP and nRP plasmids, containing LTAg in the first gene position and zGFP in the second gene position, were also transfected at 100 ng. These reverse orientation plasmids were designated pC-T-I-zGFP-BB3 (SEQ ID NO: 689) and pC-T-I-zGFP-dSV (SEQ ID NO: 690), respectively.

[0640] After 2-3 hrs of transfection time, the transfection solution was removed, and the cells were harvested into a 50 ml tube containing a total of 20 ml medium. 1-ml aliquots of the cell suspension were dispensed into well plates of various size. Cells to be analyzed on Days 1 or 2 were plated in 24-well plates; cells to be analyzed on Days 3 or 4 were plated in 12-well plates, and cells to be analyzed on Day 5 were plated in 6-well plates.

[0641] Gene expression from the vectors was examined using the GFP reporter construct contained within the vectors. Four days post-transfection, ARP (pCzGFP-I-T-BB3 or pCTIzG-BB3) and nRP (pCzGFP-I-T-dSV or pC-T-I-zGFP-dSV) transfected cells, were assessed semi-quantitatively for GFP expression, by comparing relative fluorescent micrographs taken using identical exposure settings. 50 msec, gain 1 exposures demonstrated dramatically increased GFP expression from the ARP (pCzGFP-I-T-BB3 and pCTIzG-BB3 transfected cells compared to their nRP counterparts (pCzGFP-I-T-dSV and pCTIzG-dSV). GFP expression was undetectable in cells expressing either of the nRP plasmids, under the exposure settings used. The micrographs also revealed that cells transfected with the ARP with GFP in the first position (pCzGFP-I-T-BB3) exhibited higher levels of GFP expression than cells transfected with the ARP with GFP in the second position (pCTIzG-BB3).

[0642] GFP expression was also measured quantitatively using a GFP assay kit (BIO 101® Systems). At 1, 2, and 3 days post-transfection, fluorescent cell lysates were diluted into sample buffer according to kit instructions and read in a plate reader (excitation A488, emission 436) in flat-bottomed fluorescent-permissive plastic plates with black opaque sidewalls. GFP fluorescence for untransfected cells was also measured at each time point as a negative control. GFP expression (ng/ml) was determined using a standard curve generated from purified GFP protein. The GFP signal, for each condition, at one day post-transfection defined the basal expression level, and the fold increase of GFP fluorescence was determined by normalizing the GFP fluorescence at two and three days post-transfection to the GFP signal to that detected at 1 day post-transfection.

[0643] The results showed that the levels of GFP expression was dramatically less in cells transfected with either control nRP vector (pCzGFP-I-T-dSV or pC-T-I-zGFP-dSV) than those of the ARP vectors (pCzGFP-I-T-BB3 and pC-T-I-zGFP-BB3), and the fold increases of GFP expression for the nRP vectors were indistinguishable from non-transfected cells. Throughout the study, the untransfected cells exhibited a low GFP signal that increased very slightly over time. GFP signals, detected in cells transfected with pCzGFP-I-T-dSV or pC-T-I-zG-dSV nRP vectors, were approximately 2-fold higher than the signal for untransfected cells at all time points. Thus, the GFP expression fold increase from GFP expression at 1 day post-transfection, for the nRP vectors was indistinguishable from that of the untransfected cells, confirming that the nRP vectors did not replicate.

[0644] Cells transfected with the ARP with GFP in the second position, pC-T-I-zGFP-BB3, expressed twice the amount of GFP as the nRP vectors, or about 4 times the signal from untransfected cells at 2 days post-transfection. At 3 days post-transfection pC-T-I-zGFP-BB3-transfected cells expressed approximately 4.5 times more GFP than the nRP vectors.

[0645] Cells transfected with the ARP with GFP in the first position expressed approximately 3.5 times more GFP than those transfected with the nRP vectors and almost 2 times more than cells transfected with replicating constructs with GFP in the second position. At 3 days post-transfection, GFP signal from cells transfected with pCzGFP-I-T-BB3 increased to over 5 times more than cells transfected with the nRP vectors and nearly 2 times more than cells transfected with the ARP with GFP in the second position.

[0646] In summary, these results confirmed that both of the non-replicating plasmids express GFP at similar levels, which did not substantially increase over the three days of the study. The replicating plasmids, however, both demonstrated substantially more GFP expression than the non-replicating plasmids, and the GFP expression continued to increase over the course of the study. Additionally, the replicating plasmid with GFP in the first position expressed more GFP than the replicating plasmid with GFP in the second position at each time point after the first day, indicating there is a higher level of expression of the gene located in the first position than the gene located in the second position of the bicistronic plasmid.

### B. Replication of the ARP Vector in HEK 293 Cells

[0647] In this example, replication of the ARP vector was determined using TaqMan® quantitative PCR (qPCR). Primers for TaqMan® qPCR are set forth in Table 28 below. HEK 293 cells were transfected with the ARP vector pCzGFP-I-T-BB3 (SEQ ID NO: 607), or with the control nRP counterpart vector pCzGFP-I-T-dSV (SEQ ID NO: 608), as described in part A above. HEK 293 cells were also transfected with the ARP or nRP vectors containing GFP in the second position, pC-T-I-zG-BB3 (SEQ ID NO: 689) or pC-T-I-zG-dSV (SEQ ID NO: 690), respectively. Untransfected cells also were used as a negative control.

[0648] Cells were harvested at 0, 1, 2, 3, and 4 days post transfection. For each time point, DNA was extracted with Invitrogen HQ Purelink kit, according to manufacturer's instructions, and eluted with 100 μl of DNase-free H₂O. Mock or Dpn1 digestion was then performed using 10 μl of the 100 μl DNA solution and 10 μl of reaction mix to eliminate the originally transfected, bacterially-derived plasmids. The remaining newly synthesized plasmids were subjected to quantitative PCR (qPCR), using 1 μl reaction mix per well, a zGFP-specific forward primer (5′-CAAGATTAGACACAACATAGAGGATGGA-3′; SEQ ID NO: 476), zGFP-specific reverse primer (5′-TGTGATCTCTCTTTTCATTAGGATCTTT-3′; SEQ ID NO: 477), and TaqMan® probe, (SEQ ID NO: 478: 5′-CTGTGCAGCTGGC-3′, with a 6-carboxyfluorescein (FAM) fluorophore covalently attached to the 5′ end and the dihydrocyclopyrroloindole tripeptide minor groove binder (MGB) quencher covalently attached to the 3′ end). The relative plasmid copy number was then quantified by TaqMan® quantification of PCR products versus a standard curve, for each time point. The same DNA extraction and qPCR procedures were also conducted with untransfected cells to determine the background signal from contaminating chromosomal DNA. The relative copy numbers were determined for each condition at each time point.

[0649] The untransfected cells yielded a low background relative plasmid copy number, which remained more or less the same at each time point. Cells transfected with the non-replicating vectors, pCzGFP-I-T-dSV or pC-T-I-zGFP-dSV, produced similar relative plasmid copy numbers at each time point, that were about 100 times background levels. The relative copy numbers for both non-replicating plasmids remained constant over the time course of the study. The self-replicating plasmids, pCzGFP-I-T-BB3 and pC-T-I-zG-BB3, demonstrated a steady increase in relative plasmid copy number over the course of the study. The rates at which the ARP vectors replicated, were indistinguishable from each other. In this study, the replicative ability of the ARP vectors, and the non-replicative nature of the nRP vectors, were confirmed, and it was further determined that the ARP vectors were able to replicate at similar levels, irrespective of the location of the TAg gene.

[0650] In further experiments, replication of the ARP vector, pCzGFP-I-T-BB3, in HEK293 cells was tested using gene-specific primers capable of amplifying other regions of the vector, using the protocol described above. In addition to the primers used for zGFP cDNA above, forward and reverse primers specific for wild type, CpG-free TAg (forward primer: SEQ ID NO: 491 and reverse primer: SEQ ID NO: 492) also were tested. These further experiments yielded results similar to those described above, confirming the ability of pCzGFP-I-T-BB3 to self-replication.

TABLE 28
TaqMan ® quantitative PCR (qPCR) primers

| Target | Primer | Sequence | SEQ ID NO |
|---|---|---|---|
| IRES | forward | 5′-TCTCGCCAAAGGAATGCAA-3′ | 471 |
| | reverse | 5′-CCTGCAAAGGGTCGCTACAG-3′ | 472 |
| | probe | 5′-FAM-TCTGTTGAATGTCGTGAAGG-MGB-3′ | 473 |
| zEGFP | forward | 5′-CAAGATTAGACACAACATAGAGGATGGA-3′ | 476 |
| | reverse | 5′-TGTGATCTCTCTTTTCATTAGGATCTTT-3′ | 477 |
| | probe | 5′-FAM- CTGTGCAGCTGGC-MGB-3′ | 478 |
| pUC ori | forward | 5′-GCGTAATCTGCTGCTTGCAA-3′ | 479 |
| | reverse | 5′-AAGCCAGTTACCTTCGGAAAAA-3′ | 480 |
| | probe | 5′-FAM-TTTGCCGGATCAAGAG-MGB-3′ | 481 |
| zLacZ | forward | 5′-AGAGAGGAGGCTATGCTGACAGA-3′ | 484 |
| | reverse | 5′-GAATCCAACATCACAGGCTTCA-3′ | 485 |
| | probe | 5′-VIC3-CTGCTGAGATCCCCA-MGB-3′ | 486 |

### Example 8

### Replication of ARP Vectors in Human Tumor Cell Lines

[0651] In this example, the replicative ability of autonomous replicating plasmids (ARP) was examined in a variety of cell lines.

### A. ARP Replication in a Panel of Human Tumor Cell Lines

[0652] A comprehensive panel of more than 45 human tumor cell lines was tested for replication of ARP vectors or non-replicating (nRP) control constructs (e.g. pancreatic cancer cell line, BxPC-3 (Caliper Lie Sciences); prostate carcinoma cell line, PC-3-Luc (Caliper Life Sciences); Burkitt's lymphoma cell line, Ramos (ATCC); mesothelioma cell line, REN (Smythe et al., (1994) Cancer Res. 54(8):2055-2059); osteosarcoma cell line, Saos2 (ATCC); osteosarcoma cell line, U2OS (ATCC). Plasmid replication was determined by SYBR® Green (BioRad) quantitative PCR (qPCR) using primer pairs set forth in Table 29 below.

TABLE 29
SYBR ® Green qPCR primers

| Target | Primer | Sequence | SEQ ID NO |
|---|---|---|---|
| IRES | forward | 5′- ATAGTTGTGGAAAGAGTCAA-3′ | 474 |
| | reverse | 5′- TTAACCTCGACTAAACACAT-3′ | 475 |
| zEGFP | forward | 5′- CAAGATTAGACACAACATAGAGGATGGA-3′ | 476 |
| | reverse | 5′- TGTGATCTCTCTTTTCATTAGGATCTTT-3′ | 477 |
| EGFP | forward | 5′- AAGCTGGAGTACAACTACAA-3′ | 487 |
| | reverse | 5′- ATCTTGAAGTTCACCTTGAT-3′ | 488 |
| pUC ori | forward | 5′- GCGTAATCTGCTGCTTGCAA-3′ | 479 |
| | reverse | 5′AAGCCAGTTACCTTCGGAAAAA-3′ | 480 |
| zLacZ | forward | 5′-AGAGAGGAGGCTATGCTGACAGA-3′ | 484 |
| | reverse | 5′- GAATCCAACATCACAGGCTTCA-3′ | 485 |
| zSV40-T Ag | forward | 5′- CCATAGGCATAGGGTGAGTGCAA-3′ | 491 |
| | reverse | 5′- GTCTCTGGTCAGGGCTGAATACAT-3′ | 492 |
| zGALV | forward | 5′-ACTGCAAAGAGTGGGACTGTGAGA | 493 |
| | reverse | 5′-GGCATTGCTGAAATTTCTGGGTCC | 494 |

[0653] Each cell line was transfected, using an electroporation-based method using a Nucleofector II (Amaxa), with replication competent pCzGFP-I-T-BB3 (SEQ ID NO: 607) or non-replicating pCzGFP-I-T-dSV (SEQ ID NO: 608) vectors, at a ratio of 1 μg plasmid per 4×10⁶ cells. Other replication-competent constructs were also tested, including SV40-Tag mutant vector pCzGFP-I-T (S677A S679A)-BB3 (SEQ ID NO: 730), and control vectors pSVB3 (Peden et al. (1980 Science, 290:1392-1396) and pEBNA DEST (Life Technologies, Catalog No. A10989). Cells were co-transfected with a plasmid coding for a more intensely fluorescent GFP, pmaxGFP (SEQ ID NO: 469), as a control measure for transfection efficiency. After different time points post-transfection (0-5 days), plasmid DNA was extracted from the cells via a simplified Hirt method (Hirt, B, (1967) J Mol Biol. 26(2):365-369) and the plasmid copy number was determined using SYBR® Green qPCR, using primers specific for the pUC ori (see above). Because GFP expression should increase concomitantly with plasmid copy number, GFP fluorescence was also monitored visually, to confirm the results observed by qPCR.

[0654] A wide range of replication competence among the cell lines tested was observed, ranging from barely detectable to >1000 fold amplification of plasmid (e.g. Ramos vs. U2OS cells). There was no obvious correlation between the ability of cell lines to replicate plasmid and transfection efficiency, tissue type, cell cycle speed or mutational status.

[0655] Levels of TAg expression were measured in these cell lines to determine if reduced TAg expression contributed to the reduced replication and GFP expression observed. The levels of TAg expression in weekly replicating lines were significantly lower than those in better replicating lines, suggesting that TAg expression and or/stability could be an underlying cause for the differences in replication observed among the different cell lines.

[0656] To determine if runaway replication of the plasmid itself was cytotoxic, cell viability assays (MTS) were performed at each time point following DNA delivery. Even in cell lines which were highly transfectable, and exhibited high levels of plasmid replication, such as the U2OS cells, the impact on cell viability due to replication itself was minimal (10% reduction in viability compared to the dsv-transfected cells), indicating that the vector alone is not sufficient to induce cell death.

[0657] Examples of replication results in specific transfected cell lines are provided in Table 30 below.

TABLE 30
Summary of ARP Replication in Human Tumor Cell Lines

| | | | pCzGFP- | | |
|---|---|---|---|---|---|
| | | | I-T(S677A | | |
| Tissue/ | | pCzGFP- | S679A)- | | |
| Tumor Type | Cell Line | I-T-BB3 | BB3? | pSVB3 | pEBNA |
| Kidney | Caki1 | 0 | n.d. | 0 | 0 |
| (RCC) | Caki2 | 0 | n.d. | 0 | 0 |
| | 786O | + | n.d. | n.d. | n.d. |
| Osteosarcoma | U2OS | +++ | n.d. | +++ | 0 |
| | Saos2 | +++ | n.d. | + | 0 |
| | MG63 | 0 | 0 | 0 | 0 |
| | KHOS/NP | 0 | n.d | n.d. | n.d. |
| | SJSA-1 | 0 | n.d. | n.d. | n.d. |
| | 143B | 0 | n.d. | n.d. | n.d. |
| | TI-73 | 0 | n.d. | n.d. | n.d. |
| Colon | HCT116 WT | 0 | n.d. | n.d. | n.d. |
| | HCT116 | 0 | n.d. | n.d. | n.d. |
| | p53^{-/-} | | | | |
| | HCT116 | 0 | n.d. | n.d. | n.d. |
| | p21^{-/-} | | | | |
| Breast | MCF10a | 0 | n.d. | n.d. | n.d. |
| | MCF7 | 0, +* | n.d. | n.d. | n.d. |
| | MDA-MB- | 0^{†} | n.d. | n.d. | n.d. |
| | 231 | | | | |
| Lung | A549 | 0 | n.d. | + | 0 |
| | H1299 | +, +++* | + | + | n.d. |
| Pancreas | MiaPaCa2 | + | + | n.d. | n.d. |
| | Panc2.13 | + | n.d. | n.d. | n.d. |
| | Capan1 | 0 | n.d. | n.d. | n.d. |
| | Capan2 | 0 | n.d. | n.d. | n.d. |
| Lymphoma | HL60 | 0 | n.d. | n.d. | n.d. |
| | Raji | + | n.d. | n.d. | n.d. |
| | Ramos | + | n.d. | n.d. | n.d. |
| | EB3 | 0 | n.d. | n.d. | n.d. |
| | HS-Sulta | 0 | n.d. | n.d. | n.d. |
| | NB4 | 0 | n.d. | + | n.d. |
| Fibroblasts | MRC5- | 0 | n.d. | n.d. | n.d. |
| (lung) | TERT | | | | |
| Mesothelioma | REN | +++ | n.d. | 0 | n.d. |
| | H2452 | 0 | n.d. | n.d. | n.d. |
| | H28 | 0 | n.d. | n.d. | n.d. |
| | H2052 | 0 | n.d. | n.d. | n.d. |
| | H226 | 0 | n.d. | n.d. | n.d. |
| | MSTO- | 0 | + | n.d. | n.d. |
| | 211H | | | | |
| Cervix | GH354 | 0^{†} | n.d. | n.d. | n.d. |
| Adeno- | GH329 | 0^{†} | n.d. | + | n.d. |
| carcinoma | | | | | |
| (E1A+, E1B+) | | | | | |
| Kidney | 293 | + | n.d. | n.d. | n.d. |
| | 293T | + | n.d. | n.d. | n.d. |
| Merkel cell | MKL-1 | 0 | n.d. | n.d. | n.d. |
| carcinoma | | | | | |

0 = no replication (<10 fold)
0^{†} = no replication (<10 fold), but a few bright green cells were observed by fluorescent microscopy
+ = replication up to 100 fold
+++ = replication greater than 100 fold
*= results fell into two categories from different experiments

### B. Replication of ARP in a Prostate Cancer (PC-3-Luc) Cell Line

[0658] Cells from the PC-3-Luc cell line (Caliper Life Sciences), a subclone of the PC-3 human prostate cell line that has been stably transfected with the firefly luciferase gene (Luc), were maintained as adherent monolayer cultures in F12-K medium (Mediatech, Manassas, Va.) supplemented with 10% fetal bovine serum (FBS) (Omega Scientific, Tarzana, Calif.) and incubated in 5% CO₂ with a balance of air at 37° C. Cells were split and the medium was changed biweekly. PC-3-Luc cells were transiently transfected with pCz-GFP-I-T-BB3 (SEQ ID NO: 607) using Lipofectamine 2000 (Invitrogen, Carlsbad, Calif.) as described in Example 7A above. Cells were harvested at 0, 1, 2, 3, and 4 days post transfection. Plasmid DNA was extracted from the harvested cells, Dpn1-digested (Example 7B), to eliminate the originally transfected, methylated, bacterially derived, plasmids. Plasmid copy numbers were determined using SYBR® Green quantitative PCR, as described in part A above, to determine the fold increase of copy number at each time point. The copy number of the replication plasmid (pCz-GFP-I-T-BB3) was detectable beginning at day 1 post-transfection and by day 2 post-transfection was about 75-fold that observed at day 0. By Day 4, the copy number of the replicating plasmid, ARP (pCzGFP-I-T-BB3), was approximately 200 fold that observed at day 0, whereas the non-replicating plasmid demonstrated a negligible increase in plasmid copy number at all time points.

### C. Replication of ARP in a Pancreatic Cancer (BxPC-3) Cell Line

[0659] Pancreatic cells were also analyzed as described in part A above. Transfected BxPC-3-Luc cells (Caliper Life Sciences) were harvested at 0, 1, 2, 3, and 4 days post transfection, and plasmid DNA was extracted, Dpn1-digested, to eliminate the originally transfected, methylated, bacterially derived, plasmids, and analyzed by SYBR Green quantitative PCR as discussed in part B above. At Day 4, the copy number of the replicating plasmid, ARP (pCzGFP-I-T-BB3), was approximately 40 fold that observed at day 0, whereas the non-replicating plasmid demonstrated a negligible increase in plasmid copy number at all time points.

### D. Replication of ARP in REN Mesothelioma Cells

[0660] Human mesothelioma REN cells (Smythe et al., (1994) Cancer Res. 54(8):2055-2059) were maintained in RPMI 1640 medium (Mediatech, Manassas, Va.) supplemented with 10% fetal bovine serum (FBS) (Omega Scientific, Tarzana, Calif.), incubated in 5% CO₂ with a balance of air at 37° C. Cells were harvested and the medium was changed biweekly. As another example of ARP replication capability, REN cells were transfected using either the replication-incompetent plasmid expressing GFP (pCzGFP-I-T-dSV; SEQ ID NO: 608), or the replication-competent ARP expressing the GFP gene (pCzGFP-I-T-BB3; SEQ ID NO:607). The cells were imaged by fluorescence microscopy seventy-two hrs post-transfection. A significant enhancement of GFP expression was observed in the cells that received the replication-competent ARP.

### Example 9

### Plasmid Replication with SV40 Large T Antigen Provided in Trans

[0661] In this example, expression of a gene contained within an autonomous replicating plasmid (ARP) was monitored when provided with increasing amounts of an additional source of SV40 Large T Antigen (TAg). PC-3-Luc cells were maintained as described in Example 8B above. 2×10⁵ PC-3-Luc cells were plated in 6 well plates in 3 ml media. The following day, the cells were transiently transfected, according to the protocol described in Example 7A, with the autonomous replicating plasmid expressing the gene for Gibbon Ape Leukemia Virus envelope protein (GALV), pCzGALV-I-T-BB3 (SEQ ID NO:653). In replicate wells, cells were co-transfected with 0, 10, 20, 50, 100, or 200% of pCz-GFP-I-T-BB3 (SEQ ID NO: 607), as an additional source of TAg. Replication of the pCzGALV-I-T-BB3 vector was measured by SYBR® Green quantitative PCR, as described in Example 8A above, using the GALV-specific qPCR primers set forth in SEQ ID NOS: 493 and 494, at 0, 1, 2, 3, and 4 days post-transfection. The fold increase in copy number was determined for each condition at each time point by normalizing the signal to that observed at day 0 for the same condition.

[0662] Increased co-transfection of a plasmid, supplying additional TAg in trans, corresponded to increased pCzGALV-I-T-BB3 plasmid replication, in a dose dependent manner. At day 3, PC-3-Luc cells expressing the pCzGALV-I-T-BB3 plasmid alone generated about a 2.5-fold increase in GALV-containing plasmids; co-transfection with 200% more TAg yielded a greater than 50-fold increase in GALV-containing plasmids; co-transfection with 100% more TAg resulted in a greater than 25-fold increase in GALV-containing plasmids; co-transfection with 50% or 20% additional TAg-expressing plasmid resulted in about a 10-fold increase in GALV plasmid copy number; 10% TAg supplementation yielded approximately a 5-fold increase in GALV-plasmid. The results from this experiment indicate that ARP replication is not solely governed by TAg intrinsic to the ARP. Instead, ARP replication and expression also can be regulated by TAg produced from a separate plasmid, and this suggests that other sources of TAg within a host cell also may control ARP expression.

### Example 10

### Replication of Plasmids Containing TAg Mutants that Fail to bind Rb and p53

[0663] In this example, TAg, in the autonomous replicating plasmids (ARPs), was mutated to prevent TAg binding to Rb and p53 (see Example 3). The TAg mutants were then tested for their abilities to confer selective ARP replication to p53 and Rb-deficient cells.

### A. Replication of TAg Mutants

[0664] Derivatives of pCzGFP-I-T-BB3 were generated expressing various Rb- or p53-binding mutants of TAg (L103P (SEQ ID NO: 618), C105A (SEQ ID NO: 619), E107L (SEQ ID NO: 620), E107K (SEQ ID NO: 621), E107L/E108L (SEQ ID NO: 634), and P453S (SEQ ID NO: 626), V585R (SEQ ID NO: 627), D604R (SEQ ID NO: 628)) by replacing the TAg sequence as described in Example 5 and 6. The TAg wild-type (WT) and mutant plasmids were electroporated into Rb and p53 deficient cells such as the osteosarcoma line Saos2 (ATCC), the p53-dysfunctional cell line U2.9927 (U2OS with dominant negative p53), or U2OS cells at 0.25 μg DNA/10⁶ cells (ATCC), and lack of binding was confirmed by pull-down assays. GFP expression, as a surrogate for replication, was assessed 3 days post-electroporation. The pCzGFP-I-T-dSV plasmid (SEQ ID NO:608), containing wild-type TAg, but lacking the SV40 ori was used as a negative control. Each of the replication competent mutant plasmids were capable of replication in the Rb and p53-deficient cell lines. Plasmids encoding the Rb binding mutant E107K and the p53 binding mutant V585R performed best and displayed levels of replication similar to those expressing wild-type TAg

B. Selectivity of Replication in Tumor vs. Normal Cells

[0665] In this example, the derivatives of pCzGFP-I-T-BB3 containing the p53-binding mutant of TAg V585R (designated pCzGFP-I-T(V585R)-BB3; set forth in SEQ ID NO: 627) was further tested for selective replication in p53-deficient over p53-normal cells. U2.9927 cells express a dominant negative form of p53 (DNp53), and were thus used as the p53 deficient cell line. U2OS cells (ATCC), from which U2.9927 cells were derived express wild-type p53, and served as the p53-normal cells. U2.9927 and U2OS cells were transiently transfected with pCzGFP-I-T(WT)-BB3 (SEQ ID NO: 607) or pCzGFP-I-T(V585R)-BB3 (SEQ ID NO: 627) by electroporation as described in part A above, and the replication efficacy was measured by GFP expression 3 days post-electroporation and by qPCR. The cells transfected with pCzGFP-I-T(V585R)-BB3 containing the V585R TAg mutant replicated just as well as WT in U2OS cells. Similar studies were also performed using Saos2 cells, which do not express p53.

[0666] In a further experiment, U2OS cells were treated with either nutlin-3 for 12-24 hr (a compound that leads to accumulation of high levels of active p53 through inhibition of Mdm2 or an IPTG-inducible ARF (Stott et al., EMBO, 1998) for 16-24 hr, a known activator of P53 (Lowe and Sherr, (2003) Curr Opin Genet Dev. 13(1):77-83), followed by transfection by pCzGFP-I-T(WT)-BB3 (SEQ ID NO: 607) or pCzGFP-I-T(V585R)-BB3 (SEQ ID NO: 627) and assessment of replication by way of GFP fluorescence and qPCR. Under conditions of enhanced p53 activity, pCzGFP-I-T(V585R)-BB3 replicated at the level of pCzGFP-I-T(WT)-BB3 or better. These experiments demonstrate that p53 binding mutants of TAg do not provide selectivity of replication for tumor over normal cells.

### Example 11

### Fusogenic Activity of Autonomously Replicating Plasmids (ARPs) Constructs

### A. Indentifying Candidate Fusogenic Proteins

[0667] Six fusogenic proteins capable of cell-cell fusogenic activity without the help or association with other genes were tested for independent fusogenic activity. These proteins, Avian Reovirus P10 protein (ARVp10), Reptile Reovirus P14 (RRVp14), Baboon Reovirus P15 (BRVp15), Simian Virus 5 F protein (SV5F), Vesicular Stomatitis Virus G protein (VSVG), Gibbon Ape Leukemia Virus envelope protein (GALV), and their corresponding GenBank Accession Nos. and Protein and DNA SEQ ID NOS are set forth in Table 31 below.

[0668] Initial fusogenic constructs were made by the insertion of NheI-BamHI flanked synthetic fusogenic protein cDNAs into the NheI-BamHI sites of pIRES2-zGFP (SEQ ID NO: 694) as described in Example 6, generating constructs with the formula name pC-“zF”-I-zG, where “zF” is a CpG free, human codon-optimized cDNA for a fusogenic protein, I is the internal ribosomal entry site (IRES), and zG is zGFP. When transfected into cells, these constructs express both the fusogenic cDNA and zGFP under the regulation of the CMV promoter. SEQ ID NOS for the pC-“zF”-I-G constructs are set forth in Table 31 below.

TABLE 31
Independent Fusogenic Protein Candidates

| | | SEQ ID NO | | | |
|---|---|---|---|---|---|
| Fusogenic | GenBank | | | | pC-“zF”- |
| Protein | Accession | Wild-Type | Optimized | | I-zG |
| (“F”) | No. | cDNA | cDNA | Protein | vector |
| ARVp10 | AY395797 | 8 | 9 | 39 | 715 |
| RRVp14 | DD038189 | 12 | 13 | 41 | 716 |
| BRVp15 | AF06787 | 14 | n/a | 42 | 717 |
| SV5F | NC006430 | 17 | 18 | 44 | 718 |
| VSVG | AJ318514 | 6 | 7 | 38 | 714 |
| GALV | NC001885 | 15 | 16 | 43 | 713 |

[0669] Fifty (50) ng of each pC-“zF”-I-zG construct were transiently transfected into HEK293 cells, using Lipofectamine 2000 (BioRad), according to the manufacturer's instructions. The cells were then observed by GFP fluorescence microscopy, 24 hr after transfection, for fusogenic activity: cell-cell fusion and multinucleated syncytia formation. Fusogenic proteins RRVp14, BRVp15, and GALV exhibited the most fusogenic activity and were selected for further study.

### B. Generation of Replicating and Non-Replicating Control Fusogenic Constructs

[0670] Autonomous replicating constructs containing, SV40 TAg and cDNA encoding a fusogenic protein, were constructed by digesting the pCzGFP-I-T-BB3 (SEQ ID NO: 607) or vector with NheI/BamHI, to remove zGFP, and subcloning the CpG-free, human codon-optimized fusogenic cDNAs, containing 5′ NheI and 3′ BamHI restriction sites, into the vacated zGFP position, to give rise to constructs with the formula name pC-“zF”-I-T-BB3, where “zF” is a human codon-optimized fusogenic cDNA, set forth in Table 31 above. As set forth in Example 6, the following replicating fusogenic constructs were generated by this method: pCzARVp10-I-T-BB3 (SEQ ID NO: 647), pCzRRVp14-I-T-BB3 (SEQ ID NO: 649), pCzBRVp15-I-T-BB3 (SEQ ID NO: 651), pCzGALV-I-T-BB3 (SEQ ID NO: 653), pCzSV5F-I-T-BB3 (SEQ ID NO: 655), and pCzVSVG-I-T-BB3 (SEQ ID NO: 657).

[0671] Non-replicating constructs (nRPs), containing the above-mentioned fusogenic cDNAs, were also generated, using the procedure above, except the fusogenic cDNA was subcloned into the pCzGFP-I-T-dSV construct (SEQ ID NO: 608), which lacks the SV40 ori. As set forth in Example 6, the non-replicating fusogenic constructs generated are as follows: (pCzARVp10-I-T-dSV (SEQ ID NO: 648), pCzRRVp14-I-T-dSV (SEQ ID NO: 650), pCzBRVp15-I-T-dSV (SEQ ID NO: 652), pCzGALV-I-T-dSV (SEQ ID NO: 654), pCzSV5F-I-T-dSV (SEQ ID NO: 656), and pCzVSVG-I-T-dSV (SEQ ID NO: 658).

### C. Fusogenic Activity of RRVp14 ARPs in HEK293 Cells

[0672] In this example, the ability of stand-alone fusogenic cDNA-containing construct designated pCzRRVp14-I-T-BB3 (SEQ ID NO: 649) containing the fusogenic peptide RRVp14 to form syncytia in transfected HEK 293 cells was examined. 5×10⁵ HEK293 cells were plated in triplicate in wells of a 6-well plate and transfected with 20 ng of replicating or non-replicating RRVp14 fusogenic plasmids (pCzRRVp14-I-T-BB3 (SEQ ID NO: 649) or pC-RRVp14-I-T-dSV (SEQ ID NO: 650)) by electroporation. Three days post-transfection, the cells were fixed with ice cold 100% methanol, stained with 0.05%% crystal violet (please confirm) for 30 minutes at room temperature, and then washed with 100% methanol to destain. After washing, the cells were assessed for syncytia formation. HEK293 cells expressing the nRP vectors formed a relatively low level of syncytia, whereas expression of the ARP resulted in the formation of several large multinucleated syncytia. Thus, the results show that ARPs express fusogenic peptides as demonstrated by syncytia formation in ARP-transfected HEK293.

### D. Fusogenic Activity of GALV ARPs in HEK293 Cells

[0673] In this example, the replicating and non-replicating fusogenic vectors, pC-GALV-I-T-BB3 (SEQ ID NO: 653) and pC-GALV-I-T-dSV (SEQ ID NO: 654), were compared in a fusion assay with HEK293 cells. Confluent plates (˜5×10⁵ cells) in 6-well plates were transfected with 500 ng plasmid using JetPEI™ (Polyplus-Transfection) at a 3:1 ratio. Cells were analyzed for cell fusion by phase contrast microscopy, using a 10× objective, at 10, 22, and 36 hr post-transfection, and compared with untransfected HEK293 cells.

[0674] By 10 hr post-transfection, the replication-competent pC-GALV-I-T-BB3 vector displayed visible cell-cell fusion, whereas the non-replicating dSV vector did not lead to cell-cell fusion at this early time-point. Similar cell-cell fusion was evident for both vectors by approximately 22 hr post transfection, and maximal cell fusion was observed by approximately 36 hr post transfection for both vectors. Untransfected cells did not exhibit cell-cell fusion at any time point. The fusion observed, at 10 hr post-transfection, for cells expressing the replicating vector exhibit fusion, but not for cells transfected with the non-replicating vector, is consistent with the hypothesis that the replicating vector is capable of expressing higher levels of GALV as a consequence of autonomous replication.

[0675] In a further experiment, to estimate the number of cells that might be fused in a single syncytium, HEK293 cells were transfected with low amounts of the replication-competent pC-GALV-I-T-BB3 (SEQ ID NO: 653) vector (10 ng/10⁵ cells) in order to produce a minimal amount of fusogenic foci. After allowing for cell-cell fusion to occur for six days, the number of cells that make up a fusogenic focus was estimated to be approximately 174 cells.

### E. Induction of Syncytia Formation and Cell Death by Fusogenic ARPs

[0676] In this example, fusogenic peptides were tested for their abilities to induce syncytia formation and cell death in human tumor cell lines. Fusogenic activity was assessed by microscopy and cell viability was measured by MTS assay.

[0677] PC-3-Luc cells (Caliper Life Sciences) were co-transfected with ARP pCzGALV-I-T-BB3 (SEQ ID NO: 653) and pCzGFP-I-T-BB3 (SEQ ID NO: 607), or non-replicating pCzGALV-I-T-dSV (SEQ ID NO: 654) and pCzGFP-I-T-dSV (SEQ ID NO: 608) at a ratio of 80:20 using electroporation as described above. Syncytia formation was assessed daily for 3 days post-transfection. Cells expressing the replication-competent plasmid exhibited enhanced syncytia formation, while minor syncytia were observed in cells expressing the non-replicating plasmid.

[0678] In a further experiment, U2OS cells (ATCC) were co-transfected with ARP pCzRRVp14-I-T-BB3 (SEQ ID NO: 649), or nRP pCzRRVp14-I-T-dSV (SEQ ID NO: 650), and pCzGFP-I-T-BB3 (SEQ ID NO: 607) at an 80:20 ratio, to better visualize syncytia formation. On day 3 post-transfection, the cell nuclei were stained with DAPI and examined for syncytia formation using bright field and fluorescent microscopy. Micrographs of transfected U2OS cells illustrated replication-dependent syncytia formation, as cells expressing the ARP fusogenic vector were positive for syncytia formation, while the U2OS cells expressing the nRP fusogenic vector neglected to form syncytia. The same cells were also monitored for viability using an MTS assay. U2OS cells expressing the non-replicating fusogenic plasmid exhibited about 3% cell death, compared to cells expressing the pCzGFP-I-T-BB3 control plasmid (see Example 8). In contrast, cells expressing the ARP fusogenic vector, pCzRRVp14-I-T-BB3, exhibited about a 25% reduction in viability, indicating that the cell death observed for the ARP-expressing cells was replication-dependent.

### Example 12

### Effect of ARP on Tumor Incidence and Growth in Xenograft Tumor Model

[0679] In this example, a human xenograft model was generated to assess subcutaneous tumor formation of tumor-causing cells that had been pre-transfected with auto-replicating or non-replicating plasmids expressing a fusogenic protein. Tumor take rate and size were measured to validate the model and to determine replication-dependent tumor inhibition by ARPs.

### A. Xenotransplantation of PC-3-Luc Cells

[0680] To generate a tumor mouse model, 2×10⁶ PC-3-Luc cells (Caliper Life Sciences), in 100 μl serum-free Opti-MEM medium, were injected subcutaneously into both hind flanks of male immunocompromised, athymic nude mice. On a weekly basis, for 7 weeks, the tumor growth was monitored by external caliper measurement. In order to determine the volume by external caliper, the greatest longitudinal diameter (length) and the greatest transverse diameter (width) were determined Tumor volume based on caliper measurements were calculated using a modified ellipsoid formula (Euhus et al., (1986) J Surg Oncol. 31:229-234; Tomayko and Reynolds, (1989) Cancer Chemother Pharmacol. 24:148-154):

Tumor volume=π/6(length×width²).

Sites of injection yielding tumor volumes of at least 63 mm³ were considered to be tumor-positive, as defined by the National Cancer Institute (NCI). At 7 weeks, 15 out of 16 (94%) PC-3 injection sites presented tumors by NCI standards.

### B. Effect of ARP Pre-Transfection on Tumor Incidence and Growth

[0681] To test the effect of ARPs that express fusogenic proteins on tumor incidence and growth, PC-3-Luc (Caliper Life Sciences) or REN cells (Smythe et al., (1994) Cancer Res. 54(8):2055-2059) were pre-transfected with the replication competent ARP, or replication incompetent nRP, vector containing the cDNA for GALV or RRVp14 fusogenic peptides, under the regulation of a CMV promoter, and injected into immunocompromised mice to analyze the effect of ARPs expressing fusogenic proteins on tumor incidence and growth.

[0682] i. REN Cells

[0683] REN human mesothelioma tumor cells (Smythe et al., (1994) Cancer Res. 54(8):2055-2059) were grown in vitro and transfected, according to standard protocol using Lipofectamine L2K transfection reagent, with plasmid expressing the GALV gene product in either the replication competent vector (pC-GALV-I-T-BB3; SEQ ID NO: 653) or the vector incapable of replication (pC-GALV-I-T-dSV; SEQ ID NO: 654). As a control, untransfected REN cells were also used. In one study (Study 1 in Table 32), 800 ng of plasmid DNA was transfected into 1×10⁶ REN cells. Tumor cells were transfected for approximately 4 hrs, whereupon they were harvested into serum-free media and injected into the subcutaneous flank of athymic nude (NCr nu/nu) male mice. All animals received a 100 μL subcutaneous injection of three million tumor cells (3×10⁷ cells/mL) into each rear flank of the animal (2 injections/mouse). For a positive control, untransfected REN cells were also injected into nude mice. All animals received two subcutaneous injections of tumor cells. Tumors were then allowed to initiate and grow over time, and their sizes were monitored by weekly external caliper measurements, as described in part A above. Tumor incidence was measured as the percentage of the number of tumors with volumes greater than 63 mm³ divided by the number of injection sites. Mean tumor volumes were calculated using the volumes of all visible, caliper-measurable tumors.

[0684] Nine weeks after tumor cell implantation, 94% of the injection sites that received untransfected REN cells had developed flank tumors (by NCI standards). In contrast, mice that received the REN cells pre-transfected with 800 ng of the pC-GALV-I-T-dSV construct had an incidence of 43.8%, a 53% reduction in the incidence of tumor formation compared to untransfected control (p<0.05). The lowest incidence of tumors was observed in the incidence of tumors from REN cells pre-transfected with 800 ng of the replicating pC-GALV-I-T-BB3 construct. The incidence of tumors in this group was 12.5%, an 81% reduction in incidence compared to untransfected control (p<0.05).

[0685] Mean tumor volume derived from untransfected cells, increased steadily from 0 to 218±39 mm³ (mean±SEM) in 9 weeks. In contrast, tumors derived from cells transfected with 800 ng of the non-replicating GALV-expressing construct steadily grew in volume from 0 to 68±17 mm³ in the span of 9 weeks, and tumors derived from cells transfected with 800 ng of replicating GALV-expressing construct steadily grew in volume from 0 to 18±9 mm³ in 9 weeks. Comparison of tumor volumes among treatment groups demonstrated that pre-transfection of the REN cells with 800 ng of the replication incompetent pC-GALV-dSV and the pC-GALV-BB3 vectors significantly reduced mean tumor volume by 69% and 92%, respectively, compared to untreated mean tumor volume (p<0.05) by week 9. When only volumes of tumors >63 mm³ were considered, pre-transfection of the REN cells with 800 ng of non-replicating pC-GALV-dSV and replication-competent pC-GALV-I-T-BB3 reduced tumor volume by 66% and 43%, respectively (p<0.05).

[0686] In additional studies, the amount of DNA transfected into REN cells was varied. In all experiments, pre-transfection with non-replicating fusogenic constructs reduced the tumor incidence from REN cells in immunocompromised mice, and pre-transfection with replicating fusogenic constructs eliminated tumor incidence.

TABLE 32
Tumor incidence and mean tumor volume following subcutaneous
injection of pre-transfected REN mesothelioma cells.

| | | | | % | Mean | |
|---|---|---|---|---|---|---|
| | Amount | | | Reduction | Tumor | |
| | DNA | Tumor | % Tumor | in | Volume^{b} | |
| Plasmid | Transfected | Incidence | Incidence | Incidence^{a} | (mm³) | p-value^{c} |
| Untransfected | N/A | 15/16 | 93.8% | — | 218 ± 39 | N/A |
| pC-GALV-I-T-dSV | 800 ng | 7/16 | 43.8% | 53.3% | 68 ± 17 | p < 0.05 |
| (SEQ ID NO: 654) | | | | | | |
| pC-GALV-I-T-BB3 | 800 ng | 2/16 | 12.5% | 86.7% | 18 ± 9 | p < 0.05 |
| (SEQ ID NO: 653) | | | | | | |

^{a}Compared to tumor incidence for untransfected cells
^{b}Mean ± SEM; at 9 weeks
^{c}p-value based upon 2-way ANOVA: Comparison of tumor incidence of transfected cells vs. untransfected cells

[0687] Together, the studies using pre-transfected REN and PC-3-Luc cells to generate Xenotransplant tumor models demonstrated that the expression of the GALV protein reduced the tumorigenesis of cancer cells, especially when the expression of GALV was enhanced by the use of a replication-competent plasmid vector.

[0688] ii. PC-3-Luc Cells

[0689] Human PC-3-Luc prostate cells were grown in vitro, as described previously, and transfected with a plasmid expressing the GALV gene product in either the replication competent vector (pC-zGALV-I-T-BB3; SEQ ID NO: 653) or the replication incompetent vector (pC-zGALV-I-T-dSV; SEQ ID NO: 654) according to standard protocol using Lipofectamine L2K transfection reagent. Two different quantities of each DNA construct were transfected into the PC-3-Luc cells in this study: 200 ng of plasmid DNA/1×10⁶ PC-3-Luc cells or 400 ng of plasmid DNA/1×10⁶ PC-3-Luc cells.

[0690] Transfected cells were harvested, 4 hr post-injection, into serum-free media and injected subcutaneously into both flanks of athymic nude (NCr nu/nu) mice (2 injections/mouse). Untransfected PC-3-Luc tumor cells were also injected into nude mice as a positive control. Each injection contained two million tumor cells in 100 μL (2×10⁷ cells/mL suspension). Tumor incidence and growth, were monitored over time by weekly external caliper measurement, as described in part A above. Tumor incidence was measured as the percentage of the number of tumors with volumes greater than 63 mm³ divided by the number of injection sites. Mean tumor volumes were calculated using the volumes of all visible, caliper-measurable tumors.

[0691] Five weeks after tumor cell implantation, 94% (17/18) of the injection sites receiving untransfected PC-3-Luc cells formed subcutaneous flank tumors. In contrast, the mice that received the PC-3-Luc cells pre-transfected with the pC-GALV-I-T-dSV had a significantly reduced incidence of tumor formation (31% and 87% of animals that received cells transfected with 200 and 400 ng of pC-GALV-I-T-dSV plasmid respectively, p<0.5). When these tumor cells were pre-transfected with the replication competent pC-GALV-I-T-BB3 vector, tumor incidence was further reduced compared to untransfected controls (19% and 56% respectively when transfected with 200 and 400 ng respectively). These results are summarized in Table 33. Over the five-week course of the study, the mean tumor volume progressed nearly linearly for all conditions.

[0692] Although higher amounts of plasmid DNA used for transfection did not result a higher reduction in tumor incidence, there was a similar trend in reduction of tumor incidence with both amounts of DNA transfected (Δ=20% at 200 ng; 46% at 400 ng). Notably, the reduction in tumor incidence was consistently greatest when tumor cells were transfected with the replication-competent vector compared to the replication incompetent vector, suggesting that the ability for the plasmid to replicate enhances the potency of the fusogenic plasmid vector. In addition to a reduction in tumor incidence, the mean volume of the tumors that grew in the study was significantly smaller in the group that received cells pre-transfected with the fusogenic ARP DNA compared to the untransfected PC-3 tumor cells.

[0693] In summary, the pre-transfection of tumor cells with the autologous replicating DNA plasmids demonstrated significant reduction in tumor incidence and growth in mice, indicating that the expression of the fusogenic plasmid DNA in tumor cells can result in an anti-proliferative response which is enhanced by use of a replication-competent construct.

[0694] Several additional studies were performed, in which the amount of DNA transfected was varied as presented in Table 33, and tumor growth was monitored for 4-7 weeks. In some experiments, tumors from cells transfected with the ARP and nRP fusogenic vectors were compared to those generated by untransfected cells. In other experiments, the tumors from cells expressing fusogenic replicating and non-replicating vectors were compared with tumors from cells transfected with replicating control (GFP) DNA (pCzGFP-I-T-BB3; SEQ ID NO: 607) to distinguish the fusogenic property of the vectors from the effects of vector replication. In some experiments, tumors from both untransfected and pCzGFP-I-T-BB3-transfected cells were compared to those caused by the fusogenic vectors. The percent tumor incidence and mean tumor volumes for tumors generated are set forth below in Table 34. In all cases, a decrease in the tumor take rate and a decrease of mean tumor volumes was observed for tumors derived from cells expressing the fusogenic proteins compared to those derived from untransfected or control-transfected cells. The tumor incidence and mean volumes were further reduced following injection of cells transfected with auto-replicating fusogenic proteins.

TABLE 33
Summary of tumor incidence of PC-3 tumors after pre-
transfection with GALV-expressing fusogenic plasmids

| | | | | | Mean | |
|---|---|---|---|---|---|---|
| | | | | % | Tumor | |
| | Amount of | | | Reduction | Volume ± | |
| | DNA | Tumor | % Tumor | in | SEM^{b} | |
| Plasmid | Transfected | Incidence | Incidence | Incidence^{a} | (mm3) | p-value^{c} |
| Untransfected | — | 17/18 | 94.4% | — | 459 ± 69 | |
| pC-GALV-I-T-dSV | 200 ng | 4/16 | 25% | 73.4% | 69 ± 30 | p < 0.05 |
| (SEQ ID NO: 654) | | | | | | |
| pC-GALV-I-T-BB3 | 200 ng | 1/16 | 6.3% | 93.6% | 15 ± 11 | p < 0.05 |
| (SEQ ID NO: 653) | | | | | | |
| pC-GALV-I-T-dSV | 400 ng | 14/16 | 87.5% | 7.5% | 332 ± 72 | p > 0.05 |
| (SEQ ID NO: 654) | | | | | | |
| pC-GALV-I-T-BB3 | 400 ng | 7/16 | 43.8% | 53.2% | 155 ± 70 | p < 0.05 |
| (SEQ ID NO: 653) | | | | | | |

^{a}Compared to Tumor Incidence for Untransfected
^{b}Mean ± SEM measured Week 5 post tumor cell injection
^{c}p-value based upon 2-way ANOVA: Comparison of tumor incidence of transfected cells vs. untransfected cells

TABLE 34
Tumor incidence and mean tumor volume following subcutaneous
injection of pre-transfected PC-3-Luc cells.

| | | Tumor | Total | | | Mean |
|---|---|---|---|---|---|---|
| | | Incidence/ | Vector | | | Tumor |
| Study | | Total | DNA/ | | Tumor | Volume ± |
| No. | Vector | Animals | 10⁶ cells | | Incidence | SEM^{(mm3)} |
| 1^{a} | Untransfected | 17/18 | NA | | 94.4% | 481 ± 72 |
| | pC-GALV-I-T-dSV | 14/16 | 400 | ng | 87.5% | 347 ± 76 |
| | (SEQ ID NO: 654) | | | | | |
| | pC-GALV-I-T-BB3 | 7/16 | 400 | ng | 43.8% | 162 ± 73 |
| | (SEQ ID NO: 653) | | | | | |
| | pC-GALV-I-T-dSV | 4/16 | 200 | ng | 25.0% | 73 ± 32 |
| | (SEQ ID NO: 654) | | | | | |
| | pC-GALV-I-T-BB3 | 1/16 | 200 | ng | 6.3% | 16 ± 12 |
| | (SEQ ID NO: 653) | | | | | |
| 2^{a} | Untransfected | 12/13 | NA | | 92% | 403 ± 87 |
| | Control DNA: CpG-BB | 12/15 | 1 | μg | 80% | 461 ± 11 |
| | (SEQ ID NO: 466) | | | | | |
| | pC-GALV-I-T-dSV | 12/14 | 400 | ng | 86% | 345 ± 55 |
| | (SEQ ID NO: 654) | | | | | |
| | pC-GALV-I-T-BB3 | 11/15 | 400 | ng | 73% | 276 ± 60 |
| | (SEQ ID NO: 653) | | | | | |
| 3^{b} | Untransfected | 14/15 | NA | | 93% | 814 ± 126 |
| | Control DNA: CpG-BB | 9/15 | 1 | μg | 60% | 302 ± 108 |
| | pC-GALV-I-T-dSV | 5/14 | 400 | ng | 36% | 44 ± 18 |
| | (SEQ ID NO: 654) | | | | | |
| | pC-GALV-I-T-BB3 | 4/15 | 400 | ng | 27% | 79 ± 40 |
| | (SEQ ID NO: 653) | | | | | |

^{a}Tumor measurements recorded 5 weeks post tumor cell injection
^{b}Tumor measurements recorded 6 weeks post tumor cell injection

### Example 13

### ARP Gene Delivery Via Hydrodynamic Tail-Vein (HTV) Injection

[0695] In this example, hydrodynamic tail (HTV) injection of naked plasmid DNA was evaluated as a form of gene delivery to the liver. Investigators have shown that HTV delivery of naked plasmid DNA results in high levels of transgene expression in the parenchyma of the liver (Sebestyén et al., (2006) J Gene Med. 8(7):852-73) which is capable of persistent expression in immunocompromised, athymic mice (Zhang et al., (1999) Hum Gene Ther. 10(10):1735-1737). Liver targeting and distribution of gene expression within the liver following HTV injection were determined.

### A. Targeting DNA to the Liver Via HTV Injection

[0696] In this example, the targeting of naked plasmid DNA to the liver via hydrodynamic tail vein injection (HTV) was confirmed. 10 μg of a naked luciferase-expressing reporter plasmid, pLLRNL (Xu et al. (1989) Virology 171(2):331-41) was injected by HTV in 2.5 ml volume of isotonic saline in a 5-7 second interval into sedated homozygous nude male mice. 24 hrs following injection, mice were injected with 200 μl D-luciferin (15 mg/ml). After 10 minutes, the location(s) of the vectors, were determined by detecting luciferase activity in vivo using the non-invasive IVIS bioluminescence imaging system, where the total flux of light emitted over time was measured throughout the mouse bodies. Image analysis was performed using Living Image software v4.0 (Caliper Life Sciences). Results showed high expression levels of the luciferase-expressing reporter plasmid in the liver 24 hrs after HTV injection.

[0697] In a further experiment, luciferase-containing autonomous replicating plasmids and non-replicating plasmids were cloned by replacing the GFP genes in pCzGFP-I-T-BB3 (SEQ ID NO:607) and pCzGFP-I-T-dSV (SEQ ID NO:608), with cDNA encoding luciferase (Luc), using the NheI and BamHI restriction sites, to generate pC-Luc-I-T-BB3 (SEQ ID NO:612) and pC-Luc-I-T-dSV (SEQ ID NO:613). pLLRNL, pC-Luc-I-T-BB3, and pC-Luc-I-T-dSV were each injected into the tail vein of 3 male homozygous nude mice at 0.4 mg/kg body weight in 0.1 ml isotonic saline/g body weight. The luminescence emitted from the mouse livers was measured using the IVIS bioluminescence imaging system, as described in the previous experiment, at 1, 3, 7, 10, 14, and 17 days post injection. The results are set forth in Table 35. The expression of the luciferase-containing vectors persisted until the last day of the study (17 days).

TABLE 35
Luminescence as measured by Flux (photons/sec)
in Mouse Liver Using pC-Luc Expression Vectors.

| | | Days Post Injection | | | | | |
|---|---|---|---|---|---|---|---|
| Plasmid | | 1 | 3 | 7 | 10 | 14 | 17 |
| pLLRNL | Mean | 4.07E+07 | 3.02E+05 | 1.73E+05 | 1.19E+05 | 1.24E+05 | 1.74E+05 |
| | SD | 4.09E+07 | 1.16E+05 | 9.74E+04 | 7.15E+03 | 1.55E+04 | 6.59E+03 |
| pC-Luc-I-T-dSV | Mean | 2.03E+09 | 6.73E+07 | 1.05E+07 | 5.65E+06 | 6.47E+06 | 4.60E+06 |
| (SEQ ID NO: 613) | SD | 9.86E+08 | 4.80E+07 | 5.73E+06 | 1.96E+06 | 2.45E+06 | 3.38E+06 |
| pC-Luc-I-T-BB3 | Mean | 4.15E+09 | 2.23E+07 | 5.74E+06 | 2.68E+06 | 3.37E+06 | 2.61E+06 |
| (SEQ ID NO: 612) | SD | 1.72E+09 | 9.29E+06 | 3.40E+06 | 1.83E+06 | 1.97E+06 | 1.23E+06 |

### Example 14

### Liver Toxicity Following Hydrodynamic Tail Vein (HTV) Injection of Autonomously Replicating Plasmids (ARPs)

[0698] In this example, the tolerability of HTV injection of ARPs was assessed. Nu/Nu mice were injected with vehicle only, or ARP pCzGFP-I-T-BB3 (SEQ ID NO:607) or pC-GALV-I-T-BB3 (SEQ ID NO:653) via HTV on day 0 at 0.044-0.4 mg/kg body weight. For some mice, a second dose of 0.8-1.6 mg/kg was administered at day 14. The experimental dosage details are set forth in Table 36 below.

TABLE 36
Experimental Setup for HTV Injection of ARP Vectors

| | | | Dose #1 | Dose #1 | | Dose #2 | Dose #2 |
|---|---|---|---|---|---|---|---|
| Group | Vector | n | (mg/kg) | (total μg) | n | (mg/kg) | (total μg) |
| 1 | Untreated | 7 | — | — | — | — | — |
| 2 | pCzGFP-I-T-BB3 | 14 | 0.4 | ~10 | 4 | 0.8 | ~20 |
| | (SEQ ID NO: 607) | | | | | | |
| 3 | pC-GALV-I-T-BB3 | 14 | 0.4 | ~10 | 9 | 0.8 | ~20 |
| 4 | (SEQ ID NO: 653) | 14 | 0.13 | ~3 | — | — | — |
| | | 14 | 0.044 | ~1 | 4 | 0.8 | ~20 |
| | | | | | 5 | 1.6 | ~40 |

[0699] Liver toxicity was assessed by drawing ˜200 μl blood from each mouse on days 2, 4, 7, and 22 and measuring the liver enzymes, alanine aminotransferase (ALT) and aspartate aminotransferase (AST) by using a Liasys Chemistry Analyzer.

[0700] Single and repeat HTV administration of GALV ARP resulted in transient elevation of both AST and ALT liver enzymes, by day 2, returning to basal levels by day 4. All doses of GALV ARP resulted in similar responses. Administration of GFP ARP 2 days post HTV injection, mice injected with GFP demonstrated a similar increase in ALT levels as was observed for the GALV ARP, but an increase in AST levels was not observed. Injection of vehicle alone GFP ARP and GALV ARPs resulted in a transient rise in the liver enzyme levels on day 2 post injection that resolved for all groups by day 4 post injection.

[0701] Because the elevation in liver enzymes on day 2 was observed in all treatment groups, the increase was determined to be an expected cardiovascular response as a result of the transient increase in blood pressure and blood volume that results from HTV injection. The increase in serum transaminases for the mice treated with the GALV-expressing vectors was consistent with reports by other investigators (Liu F. and Liu D., (1999) Hydrodynamics-based transfection in animals by systemic administration of plasmid DNA. Gene Ther. 6: 1258-1266). For mice injected with the GALV ARP, no adverse events (AEs) were observed at the highest level tested (1.6 mg/kg (˜40 μg/mouse)), confirming that HTV delivery of oncovector plasmids was well-tolerated under the conditions tested.

### Example 15

### Characterization of Liver-Localized Tumor Models in Nude Mice

[0702] In this example, intrasplenic and intralobular injections of tumor-causing cells into male nude mice were evaluated as liver-localized tumor models. To non-invasively assess tumor growth over time, human prostate cancer PC-3 cells stably transfected with the firefly luciferase gene (PC-3-Luc; described in Example 8), were used. PC-3-Luc cells emit light, produced by luciferase enzyme activity upon administration of the luciferin substrate. The luminescence produced is approximately equivalent among individual PC-3-Luc cells (Feng et al., (2011) J Cancer. 2:123-131), allowing the tumor burden for each animal to be approximated by the light emission following substrate administration (Jenkins et al., (2003) Clin Exp Metastasis. 20(8):745-56).

### A. Intralobular Liver-Localized Tumor Model

[0703] In this example, liver-localized tumors were generated by direct intralobular injection of PC-3-Luc cells. Male (Nu/Nu) mice were anesthetized, and an incision was made on the abdomen to expose the liver. 1.5×10⁵ PC-3-Luc cells, in 15 μl sterile HBSS with 50% Matrigel, were injected directly into the liver. The abdominal musculature and skin were sutured and the animals recovered on a warming pad to restore body temperature and returned to their home cage. Tumor formation, for a total of 38 animals, was monitored in vivo using the IVIS Caliper imaging system (Caliper Life Sciences; details to follow), at 1, 7, 14, 21, 28, 35, 42, and 56 days post inoculation. For luciferase detection imaging, 200 ml of 15 mg/ml D-Luciferin (Caliper Life Sciences) in PBS was injected intraperitoneally eight to twelve minutes before imaging. Emitted light was detected using a CCD camera (IVIS/Caliper imaging system). The photometry of developed tumors was calculated by Living Image 4.0 (Caliper Life Sciences) software, and the results were used to generate a tumor growth curve.

[0704] Tumor growth or regression was calculated for each animal relative to its initial tumor burden at the beginning of treatment to account for differences of overall signal due to differing tumor establishment and localization in individual animals.

[0705] In vivo imaging indicated that the tumors continued to grow over the course of the study. At the early time points (days 1, 7, 14), the tumor growth was slow. The rate of growth increased by day 21 and the rate of growth (slope of the curve) continued to increase between each time point until completion of the study.

[0706] Tumors were also visually confirmed by examining the tissue structure of liver sections following hematoxylin and eosin (H&E) staining. The tumor take rate, following intralobular injection of PC-3-Luc cells was >95%, with a single focal tumor per animal.

### B. Intrasplenic Liver-Localized Tumor Model

[0707] To establish liver tumors in which tumor causing cells infiltrate the liver in addition to generating bulk sub-cutaneous tumors, PC-3-Luc cells were delivered to the liver after injection into the spleen, using a modified protocol developed by Anderson et al. (Anderson et al., (1998) Clin. Cancer Res. 4:1649-1659). Briefly, male Nude mice were anesthetized, and an incision was made on the left side of the abdomen, such that the spleen could be retracted and exteriorized. 2×10⁶ PC-3-Luc cells were injected into the lumen of the spleen, followed by splenic squeeze. After allowing the cells to distribute for approximately one minute, the blood vessels connected to the spleen were ligated and the spleen was removed. The abdominal musculature and skin were then sutured. Recovering mice were warmed to restore body temperature and returned to their home cages. Intrasplenically-delivered tumor cells were expected to migrate via the portal vein from the spleen into the liver, resulting in the formation of multiple tumor foci over time

[0708] Tumor formation was monitored in vivo by the IVIS bioluminescence system as described in part A above at several time points from 1 up to 45 days post cell injection. A total of 30 animals were monitored for tumor formation over 4 independent studies. 53% (16/30) of the mice developed liver tumors (<63 mm³, NCI criteria) following intrasplenic injection of PC-3-Luc cells. In one experiment, animals were sacrificed at day 35 post intrasplenic injection, and the tissue structure of liver sections was examined following H&E staining (described in part A above). In these animals, the presence of liver-localized tumors was confirmed. Intrasplenic delivery of PC-3-Luc cells to the liver resulted in the formation of multiple tumor foci over time, and although each animal received the same dose of tumor cells, the number and size of the tumors that initiated were variable between animals.

### Example 16

### Efficacy of Hydrodynamic Tail Vein (HTV)-Delivered Oncovectors in Mouse Liver Tumor Models

[0709] In this example, liver localized tumor models were used as a readout of anti-proliferative activity of autonomously replicating plasmids (ARPs) expressing fusogenic proteins or a pro-drug converting enzyme. Naked ARPs were injected by HTV delivery into PC-3-Luc mouse liver models (described in Example 15) to assess the efficacy of the oncovectors with respect to tumor size. Tumor burden was assessed via bioluminescence as described in Example 15. To reduce variability between each animal, due to attenuation of the overall signal because of variations in the precise localization of the tumors, tumor growth or regression was calculated for each animal relative to its initial tumor burden at the beginning of treatment.

### A. Efficacy of Fusogenic Oncovectors

[0710] To evaluate the effect of ARP delivery into an intrasplenic liver tumor model, 2×10⁶ PC-3-Luc cells were delivered to the livers, by intrasplenic injection (as described in Example 15B), of 50 mice on day 0. The tumors derived from the PC-3-Luc cells were imaged in vivo using the IVIS/Caliper imaging system described in Example 15 on days 1, 7, and 14 post-injection, eight to twelve minutes post injection of luciferin in saline (15 mg/kg). Tumor burden was quantified by measuring the total flux of light emitted over time. Image analysis was performed using Living Image software v4.0 (Caliper Life Sciences).

[0711] 27 animals were found to bear liver-localized tumors. These animals were randomized into three treatment groups of approximately equal mean tumor burden (˜7×10⁷ photons/sec) on Day 14 post injection. On day 17 post-injection, the mice received an HTV injection of the plasmid DNA: 0.4 mg plasmid/kg mouse body weight. One group of mice received administration of the plasmid containing the GALV gene in the replication-competent backbone, pC-GALV-I-T-BB3 (SEQ ID NO: 653). To assess the baseline anti-proliferative activity of the fusogenic GALV gene in the non-replicating backbone, another group of mice received an HTV injection of pC-GALV-I-T-dSV (SEQ ID NO: 654). A third group of mice received HTV injection of a replication-competent plasmid containing a reporter Green Fluorescent Protein (GFP) gene instead of the fusogenic GALV gene (pCzGFP-I-T-BB3 (SEQ ID NO: 607)), to resolve the anti-proliferative effects due to the expression of the fusogenic GALV protein from effects resulting from plasmid replication. Tumor growth was monitored on days 20, 23, 27, and 30 post tumor cell injection. On day 34, the mice were administered a second dose (0.4 mg/kg) of plasmid, and the tumor growth was assessed on days 35, 37, 41, 44, 49, 52, and 55. Tumor growth was monitored by non-invasive luciferase imaging throughout the study, and tumor burden was normalized to the luciferase expression measured on Day 14 post tumor cell injection. The growth of tumors was expressed as the fold-increase in luciferase expression compared to the original baseline value recorded on day 14 post cell injection. The relative increase in luciferase expression was calculated for each treatment group over time. Tumor Growth Inhibition (% TGI) for treatment groups was determined on Day 52 post tumor cell injection, and was calculated using the following formula:

[1−(T_{B}−T_{A})÷(C_{B}−C_{A})]×100

where T_{B} is the average tumor luciferase expression (photons/sec) in the treatment (pC-GALV-I-T-dSV or pC-GALV-I-T-BB3) groups at 38 days after initiation of treatment (52 days post tumor cell implantation); T_{A} is the average luciferase expression (photons/sec) in the treatment groups at day −3 before treatment (14 days post tumor cell implantation); C_{B} is the average luciferase expression (photons/sec) in the control group (pCzGFP-I-T-BB3) at 38 days after initiation of treatment (52 days post tumor cell implantation); and C_{A} is the average luciferase expression (photons/sec) in the control group at day −3 before treatment. Results from this study are recounted below.

[0712] Following the first plasmid dose, a minimal increase in luciferase expression (tumor size) was observed in all experimental groups. Following the second dose, the experimental group injected with the replicating GFP plasmid exhibited a rapid and sustained increase in luciferase expression, indicating increased tumor size. The non-replicating GALV-expressing plasmid also exhibited increased luciferase expression following the second plasmid dose. However, the rate of increase was less than that observed for the replicating GFP plasmid (control group). By day 55, the average fold increase in luciferase expression in mice administered the non-replicating GALV plasmid was reduced by 41% compared to the control group. Tumor growth in mice administered the replicating GALV plasmid was reduced by 76% compared to the control group and the difference was statistically significant (p<0.05).

[0713] The inhibition of tumor growth observed is consistent with an anti-proliferative effect due to expression of the GALV gene, with the anti-tumor activity of the non-replicating vector (pC-GALV-I-T-dSV) being less than the anti-tumor activity of the replicating vector (pC-GALV-I-T-BB3). These results suggest that the GALV-expressing plasmids have anti-proliferative activity, and that the replication competent GALV-expressing vector, pC-GALV-I-T-BB3, has greater potency than the non-replicating vector, presumably due to an increase in the cytotoxicity that results from the higher expression of GALV.

[0714] In a subsequent experiment, the anti-tumor activities of the same three plasmids, and including non-replicating GFP-expressing plasmid (pCzGFP-I-T-dSV (SEQ ID NO: 608)), were evaluated. Mice bearing intrasplenic liver localized PC-3-Luc tumors received five HTV injections of either the oncovector ARPs or a GFP-expressing reporter construct (dosed on days 19, 22, 27, 30 and 34 post cell injection). While the greatest tumor inhibition was observed in the group of mice receiving the replication competent oncovector ARP (pC-GALV-I-T-BB3), this tumor inhibition was not statistically significant compared to the other treatment groups. It is possible that the increase in frequency of dosing may have affected the expression of the fusogenic proteins, due to the continual transient effects on liver parenchymal cells that occur as a result of HTV injection (as evidenced by the transient elevation in serum transaminases that was observed after HTV injection.)

### B. Efficacy of a Pro-Drug Converting Enzyme

[0715] In this example, the efficacy of an oncovector ARP expressing a pro-drug converting enzyme was evaluated in an intralobular liver-localized tumor mouse model. The experimental setup for this experiment was similar to that described in part A above, using an liver-localized tumor model generated by intralobular injection of PC-3-Luc cells as described in Example 15A. Additionally, rather than expressing a fusogenic peptide, the experimental constructs used in this study expressed the cytosine deaminase (CDase) gene, which converts non-toxic 5-fluorocytosine (5-FC) to 5-fluorouracil (5-FU), a potent chemotherapy compound. To clone these constructs, the GFP genes in replicating pCzGFP-I-T-BB3 (SEQ ID NO: 607) and non-replicating pCzGFP-I-T-dSV (SEQ ID NO: 608) were replaced with CDase gene (SEQ ID NO: 500) as described in Example 6 above, to generate the replicating pC-CDase-I-T-BB3 (SEQ ID NO: 664) and non-replicating pC-CDase-I-T-dSV plasmids (SEQ ID NO: 665).

[0716] Mice receiving intralobular injection of PC-3-Luc cells (1.5×10⁵ in 15 μL of serum-free HBSS), as described in Example 15A, were administered one of the replicating or non-replicating CDase-expressing constructs or the non-replicating GFP-expressing control construct (pCzGFP-I-T-dSV (SEQ ID NO: 608)), at 0.4 mg plasmid/kg body weight, via HTV injection (refer to Example 13 for experimental details of HTV injection). Tumors were allowed to grow over a period of three weeks, whereupon they received an initial HTV injection of either the oncovector ARP or the non-replicating GFP-expressing control construct (Study day 22). Forty eight hours after HTV injection, the animals received their initial administration of 5-FC via an initial intraperitoneal loading dose of 5-FC (100 mg/kg; 5 mg/mL in saline). 5-FC was subsequently provided in their drinking water (5 mg/mL) throughout the remainder of the study. The animals received two subsequent HTV re-administrations of the same vector on Study days 36 and 53. Tumor growth was monitored in vivo using the IVIS bioluminescence system (see Example 15) over a period of 60 days. Upon completion of the study, there were no statistically significant differences between the different treatment groups with respect to tumor size.

[0717] While it is well established that HTV injection will provide high levels of gene transfer and expression to hepatocytes, it was not established whether HTV injection would facilitate gene transfer to the intralobular tumors. To address this issue, a satellite group of mice were included in this study that received a single HTV injection of a reporter plasmid expressing the beta-galactosidase gene driven by the CMV promoter (pC-β-gal; 0.4 mg/kg) on day 22 post tumor cell injection. Forty eight hours post HTV injection, the mice were sacrificed and their livers collected frozen in OCT. Sections of the liver were prepared (5 μM) and subsequently fixed (0.2% glutaraldehyde) and stained for lacZ was injected into the HTV of three mice. The livers were harvested 48 hr after HTV injection and frozen in OCT. 5 μm cryosections were fixed with 0.2% glutaraldehyde and then incubated with a staining solution containing 1 mg/ml 5-bromo-4-chloro-3-indolyl-β-D-galactopyranoside (X-gal), 35 mM potassium ferrocyanide, 2 mM MgCl₂, 0.02% NP-40, and 0.01% sodium deoxycholate for 2 h at 37° C. Lac Z staining was visualized by light microscopy (original image obtained using 40× objective). Micrographs taken of representative liver sections demonstrated uniform expression of HTV-injected pC-β-gal throughout the liver. However, no gene expression was observed in the tumor tissue. This inability to demonstrate gene transfer and expression may be a primary factor responsible for the lack of tumor inhibition observed in the intralobular efficacy study using the CDase expressing ARPs.

### Example 17

### In Vivo Replication and Tumor Selectivity of Autonomous Replicating Vectors (ARPs)

[0718] In this example the replication of the autonomous replicating vectors (ARPs) is demonstrated in vivo in an intralobular liver-localized tumor model and compared to non-replicating vectors. The selectivity of replication and expression in tumor cells, as compared to healthy tissue, is also assessed by examining the biodistribution of ARP plasmids and gene expression.

[0719] A liver-localized tumor model is generated by intralobular injection of PC-3 (no Luc) cells as described in Example 15A. About 14 days post-injection, mice are administered pC-Luc-I-T-BB3 (SEQ ID NO: 612) or pC-Luc-I-T-dSV (SEQ ID NO: 613) by HTV injection (experimental details provided in Example 13). At multiple time points following plasmid administration, luciferase expression is monitored at regular intervals in vivo using bioluminescence (detailed in Example 15) and quantified to confirm in vivo replication via increased luciferase expression over time. Because intralobular injection of PC-3 cells was shown to generate single focal tumors, luciferase signal is monitored at the foci as well as surrounding tissue to determine the specificity of the replication. To further confirm replication, at 2-3 time points post plasmid administration, a minimum of 3 animals from each experimental group are sacrificed, the livers are harvested and dissected to separate tumors from healthy tissue. The respective tissues are then pulverized, plasmid DNA is extracted using a modified Hirt method, and the plasmid number is determined by qPCR as described in Example 7B, providing a quantitative readout for the tissue specificity of plasmid replication.

[0720] In a further experiment, the luciferase gene in replicating and non-replicating plasmids used above is replaced with a gene encoding β-galactosidase, generating pC-βgal-I-T-BB3 (SEQ ID NO: 614) and pC-βgal-I-T-dSV (SEQ ID NO: 615). Mice containing a liver-localized tumor following intralobular injection of PC-3 cells are injected with replicating and non-replicating plasmids as described above. At multiple time points, a minimum of 3 animals are sacrificed, the liver is extracted, cryosectioned, and stained for lac Z as described in Example 16B. Sections containing healthy tissue and the tumor are assessed for lac Z staining to determine the tissue selectivity of transgene expression.

### Example 18

### Bystander Effect of Autonomous Replicating Oncovectors

[0721] In this example, the autonomous replicating plasmids (ARPs), expressing fusogenic peptides or pro-drug converting enzymes are tested for their abilities to induce cell death in neighboring cells, not expressing ARP, known as the bystander effect, in xenotransplant mouse liver tumor models.

### A. Bystander Effect of Fusogenic Oncovectors

[0722] PC-3 cells are transfected with the following replication competent (ARP) or non-replicating (nRP) vectors containing the cDNA for the fusogenic peptides RRVp14; BRVp15; or GALV, under the regulation of a CMV promoter via electroporation: pC-RRVp14-I-T-BB3 (SEQ ID NO: 649), pC-RRVp14-I-T-dSV (SEQ ID NO: 650), pC-BRVp15-I-T-BB3 (SEQ ID NO: 651), pC-BRVp15-I-T-dSV (SEQ ID NO: 652), pC-GALV-I-T-BB3 (SEQ ID NO: 653), pC-GALV-I-T-dSV (SEQ ID NO: 654). Cells are also co-transfected, at a plasmid ratio of 1:1, with a non-replicating GFP-expressing plasmid which lacks the IRES sequence (pCzGFP-deltaI-T-BB3; SEQ ID NO: 609). Luciferase-expressing PC-3 cells (PC-3-Luc) are also transfected with pCzGFP-deltaI-T-BB3. Post-transfection, the ARP-transfected cells are mixed at different ratios with the control, transfected PC-3-Luc cells. The cell mixtures are then injected subcutaneously into nude mice, and luciferase activity is monitored, and tumor size is directly measured in vivo as described in Example 12 for 4-7 weeks. In the case of mice injected with CDase-expressing construct, the mice are provided drinking water with or without 5-FC. The reduction in luciferase-containing cells is quantified and used to calculate the number of neighboring, ARP non-expressing cells can be killed by a single cell targeted with an ARP, and serves as measurement of bystander activity. On the last day of the study, the tumors are extracted, cryo-sectioned, and analyzed for syncytia formation. GFP expression facilitates visualization of the syncytia. ARPs best able to propagate fusogenic/anticancer activity beyond the initially targeted cancer cells are then chosen for further study and optimization.

### B. Combinatorial Oncovector Treatment and Bystander Effect

[0723] In a further experiment, the combination of a fusogenic peptide and an adjunct therapy gene is tested to assess whether combinatorial treatment can enhance the bystander effect. For this experiment, a construct is generated to introduce the pro-drug, adjunct therapy gene CDase (SEQ ID NO: 500; encoding CDase protein set forth as SEQ ID NO: 502), between the Pf1FI and Bg1II restriction sites of the fusogenic ARP construct exhibiting the greatest bystander effect in part A above. The newly generated construct is co-transfected, at a plasmid ratio of 1:1, with a non-replicating GFP-expressing plasmid which lacks the IRES sequence (pCzGFP-deltaI-T-BB3; SEQ ID NO: 609) into PC-3 cells. Transfected PC-3 cells and untransfected PC-3-Luc cells are mixed at different ratios, and the cell mixtures are injected subcutaneously into nude mice. The injected animals are divided into two groups. One group is provided with 5-FC in the drinking water while the control group is not. Reporter expression (e.g. bioluminescence or fluorescence) is monitored weekly to directly measure tumor size in vivo over a period of 4-7 weeks. The reporter expression is compared between the 5-FC-treated and untreated animals to determine the combined bystander effect.

### Example 19

### Tumor-Specific Gene Expression and Replication of Autonomous Replicating Plasmids (ARPs) Using Cell Cycle-Dependent Promoters

[0724] In this example, a panel of cell cycle-dependent (CCD) promoters are used to assess if gene expression and replication of ARPs are restricted to tumor cells. The efficacy of tumor-specific gene regulation of CCD promoters is examined in cell culture and in vivo.

### A. Tumor Selectivity of Cell Cycle-Dependent Promoters

[0725] To test the tumor selectivity of various promoters which have been described as tumor-specific, constructs are cloned using pCzGFP-I-T-dSV (SEQ ID NO: 608). GFP is replaced with the gene for the reporter protein, secreted embryonic alkaline phosphatase (SEAP) between the NheI and BamHI restriction sites, and the CMV promoter is replaced with promoters listed in Table 37 between the AseI and NheI restriction sites. A variety of normal and cancer cell lines from different cell lineages are transfected with the reporter constructs. 48-72 hrs after cell transfection, cell culture media are removed and transferred to a microcentrifuge tube. Any detached cells present in the culture medium are pelleted by centrifugation. Supernatant is removed and analyzed for SEAP activity. The cells are also harvested, homogenized, and the level of TAg expression is determined by Western blot. These two assays provide the extent of tumor selectivity and TAg expression.

TABLE 37
Tumor Specific Promoters

| | SEQ ID NO |
|---|---|
| | (SEQ ID NO w/ |
| Cell Cycle-Dependent (CCD) Promoter | restriction sites) |
| CMV promoter | 504 |
| Telomerase promoter | 530 (679) |
| E2F-1 promoter | 534 (680), 535 (681) |
| Modified E2F-1 promoter | 536 (682), 537 (683) |
| Synthetic E2F-like promoter | 538 (684), 539 (685), |
| | 540 (686), 541 (687) |
| Antigen 33 (A33) promoter | 532 |
| Cyclo-oxygenase-2 (COX-2) promoter | 533 |
| Human carcinoembryonic antigen (CEA) | 531 |
| promoter | |
| Cyclin A (CycA) promoter | 519 |
| Cell division cycle 2 (Cdc2) promoter | 520 |
| Cell division cycle 25 (Cdc25) promoter | 521 |
| B-myb promoter | 522 |
| p107 promoter | 523 |
| Tyrosine Kinase (TK) promoter | 526 |
| DNA polymerase alpha promoter | 527 |
| Histone 2A (H2A) promoter | 528 |
| C-myc promoter | 529 |
| Synthetic cell cycle-dependent promoter | 505 |

### B. Cell Cycle-Dependent Expression and Replication of ARPs in Cell Culture

[0726] The CMV promoters in pCzGFP-I-T-BB3 (SEQ ID NO: 607) and pCzGFP-I-T-dSV (SEQ ID NO: 608) constructs are replaced with each of the CCD promoters, listed in Table 37, between AseI and NheI restriction sites as described in Example 5, to generate pCCDzGFP-I-T-BB3 and pCCDzGFP-I-T-dSV. Plasmids containing CCD promoters are also combined with TAg mutants, described in Example 10, to test for further selectivity of tumor-specific expression via limiting replication of leaky plasmid expression in cells containing functional Rb and/or p53.

[0727] Normal cells, represented by low passage cells, such as small airway epithelial cells (SAEC), and tumor cells, such as PC-3 cells, are transfected with replication competent pCCDzGFP-I-T-BB3, non-replicating pCCDzGFP-I-T-dSV, or non-discriminately replicating pCzGFP-I-T-BB3 (SEQ ID NO: 607). GFP expression and plasmid replication are measured in cells for each condition, as described in Example 8. The selectivity of ARP expression is determined by comparing the GFP expression and plasmid copy levels of the cells transfected with the replicating, cell cycle-dependent construct, pCCD-GFP-I-T-BB3, with the non-replicating negative control, pCCD-GFP-I-T-dSV, and the universal replicating positive control vector, pCzGFP-I-T-BB3 (SEQ ID NO: 607).

### C. Cell Cycle-Dependent Expression and Replication of ARPs In Vivo

[0728] To determine the specificity of the cell cycle-dependent promoter in controlling ARP gene expression in vivo, the constructs in part B above demonstrating selective tumor expression are used to confirm tumor-specific expression and replication in vivo. The GFP genes in the pCCDzGFP-I-T-BB3 and pCCDzGFP-I-T-dSV constructs used in part B are replaced with luciferase or β-galactosidase (β-gal) reporter constructs, generating pCCD-Luc-I-T-BB3, pCCD-Luc-I-T-dSV, pCCD-βgal-I-T-BB3, and pCCD-βgal-I-T-dSV. The replication and selectivity of ARP expression in an intralobular liver-localized tumor model, as described in Example 17.

### Example 20

### Systemic Delivery of Autonomous Replicating Oncovectors into Xenograft Mouse Tumor Model

### A. Nanoparticle Delivery System Optimization

[0729] To develop a method to efficiently deliver ARPs to tumor cells, several drug delivery systems (DDSs) are tested. Various plasmid/nanoparticle complexes are generated containing pC-mKate2-I-T-BB3 (SEQ ID NO: 611) and one of the following: polyethylenimine (PEI) polymer (Genesee Scientific), polypropylenimine dendrimer PPIG3 polymer (Chisholm, 2009), B-amino-ester polymer (Stemgent; Huang, 2009), liposome formulation (Invitrogen), or sugar molecule such as cyclodextrin polymers (Calando; Bellocq, 2003). The plasmid/nanoparticle complexes are then administered systemically to an intralobular-injected liver-localized tumor model by HTV injection (see Examples 13 and 15A), at various concentrations. Animals are monitored for reporter expression, e.g. fluorescence and bioluminescence imaging, in vivo, as described in the Examples above to ascertain the extent and location of plasmid delivery, and determine if tumor localization occurs through enhanced permeability and retention effect (EPR). Optimized conditions for plasmid/nanoparticle delivery are then used to administer ARPs expressing fusogenic peptides to test for efficacy in the treatment of human carcinoma xenografts in part B below.

### B. Nanoparticle Delivery of Fusogenic ARPs

[0730] In this example, autonomous replicating constructs containing DNA encoding fusogenic peptides are packaged into nanoparticles, prepared in part A, and administered to an intralobular liver-localized tumor model via systemic delivery to determine if the systemic delivery of these complexes can, in a replication dependent manner, reduce growth of established PC-3-Luc subcutaneous and liver tumors.

[0731] The zRFP genes in ARP and nRP constructs are replaced with the mKate2 reporter construct (SEQ ID NO: 549). Nanoparticle alone, or nanoparticle/plasmid complexes containing the mKate2-containing ARPs or nRPs are injected into nude mice containing intralobular-injected liver-localized tumors (described in Example 15A) via the hydrodynamic tail vein (HTV). Tumor size and plasmid replication and localization are monitored by reporter expression in vivo, e.g. bioluminescence and fluorescence imaging, respectively.

[0732] Since modifications will be apparent to those of skill in this art, it is intended that this invention be limited only by the scope of the appended claims.

What is claimed is:

1. A non-viral nucleic acid vector, comprising:
a) an origin of replication;
b) a first open reading frame coding for a fusogenic protein; and
c) a second open reading frame coding for a replication initiator protein that activates the origin of replication for episomal replication of the vector in a cell in which it is expressed.

2. The non-viral nucleic acid vector of claim 1 that is a non-viral oncovector.

3. The non-viral nucleic acid vector of claim 1 that comprises at least one promoter that is operatively linked to control expression of a first and/or second open reading frame.

4. The non-viral nucleic acid vector of claim 3, wherein:
the first open reading frame and second open reading frame are separated by an internal ribosome entry site (IRES); and
the first and second open reading frame are expressed under control of the same promoter.

5. The non-viral nucleic acid vector of claim 4, wherein the nucleic acid comprises in reading frame order 5′ to 3′:
a) a promoter operatively linked to control expression of the first and second open reading frame, a first open reading frame coding for a fusogenic protein, an IRES, a second open reading frame coding for the replication initiator and an origin of replication; or
b) a promoter operatively linked to control expression of the first and second open reading frame, a second open reading frame coding for the replication initiator, an IRES, a first open reading frame coding for a fusogenic protein and an origin of replication.

6. The non-viral nucleic acid vector of claim 3, wherein the nucleic acid molecule comprises:
a first promoter that is operatively linked to control expression of the first open reading frame coding for the fusogenic protein; and
a second promoter that is operatively linked to control expression of the second open reading frame coding for the replication initiator.

7. The non-viral nucleic acid vector of claim 6, wherein the nucleic acid comprises in reading frame order 5′ to 3′:
a first promoter operatively linked to control expression of the first open reading frame, a first open reading frame coding for a fusogenic protein, a second promoter that is operatively linked to control expression of the second open reading frame, a second open reading frame coding for a replication initiator and an origin of replication; or
a second promoter that is operatively linked to control expression of the second open reading frame, a second open reading frame coding for a replication initiator, a first promoter operatively linked to control expression of the first open reading frame, a first open reading frame coding for a fusogenic protein.

8. The non-viral nucleic acid vector of claim 6, wherein the first and second promoter are the same or different.

9. A non-viral nucleic acid vector composition or combination, comprising:
a) a first nucleic acid molecule comprising an origin of replication and a first open reading frame coding for a fusogenic protein; and
b) a second nucleic acid molecule comprising a second open reading frame coding for a replication initiator that activates the origin of replication in the first nucleic acid molecule when the first and second nucleic acid molecule are delivered into the same host cell for episomal replication of the first nucleic acid molecule.

10. The non-viral nucleic acid vector composition or combination of claim 9, wherein the first and second nucleic acid molecule are part of the same molecule or are on separate nucleic acid molecules.

11. The non-viral nucleic acid vector composition or combination of claim 9, wherein the first and second nucleic acid molecule each comprise at least one promoter that is operatively linked to control expression of the first and second open reading frame.

12. The non-viral nucleic acid vector composition or combination of claim 11, wherein the promoter is the same or different.

13. The non-viral nucleic acid vector of claim 1, wherein the origin of replication and replication initiator are selected from among:
a) an SV40 origin and an SV40 T antigen;
b) a BKV origin and BKV large T antigen;
c) a BKV origin and SV40 T antigen; and
c) an EBV origin and Epstein Barr virus Nuclear Antigen (EBNA).

14. The non-viral nucleic acid vector of claim 13, wherein the origin of replication is an SV40 origin and the replication initiator is an SV40 T antigen.

15. The non-viral nucleic acid vector of claim 14, wherein the SV40 origin is selected from among:
an SV40 origin that comprises an SV40 large T antigen core binding site set forth in SEQ ID NO:123;
a variant thereof having the formula set forth in SEQ ID NO:124 that exhibits at least 85% sequence identity to SEQ ID NO:123; or
an SV40 origin of replication that comprises a variant SV40 T antigen core binding site set forth in any of SEQ ID NOS: 125-189 and that exhibits at least 85% sequence identity to SEQ ID NO:123.

16. The non-viral nucleic acid vector of claim 14, wherein the origin of replication is a modified SV40 origin that is modified to remove upstream enhancers or that is modified to remove CpG motifs and/or is human codon-optimized.

17. The non-viral nucleic acid vector of claim 16, wherein the origin of replication is selected from among an SV40 origin of replication that comprises the sequence set forth in SEQ ID NO:113, 114, 115, or 116 or that comprises a sequence that exhibits at least 85% sequence identity to any of SEQ ID NOS: 113, 114, 115 or 116.

18. The non-viral nucleic acid vector of claim 14, wherein the second open reading frame codes a replication initiator that is an SV40 large T antigen.

19. The non-viral nucleic acid vector of claim 18, wherein the second open reading frame coding for a replication initiator protein is a modified SV40 large T antigen that is modified to remove CpG motifs, is human-codon optimized and/or is modified to reduce its cellular transforming activity.

20. The non-viral nucleic acid vector of claim 18, wherein:
the second open reading frame coding for an SV40 large T antigen comprises the sequence set forth in any of SEQ ID NOS: 561, 562 or 563, degenerates thereof or a sequence that exhibits at least 85% sequence identity to any of SEQ ID NOS: 561, 562 or 563 or degenerates thereof; or
the second open reading frame encodes an SV40 large T antigen comprising the sequence of amino acids set forth in SEQ ID NO:564, or a variant thereof that exhibits at least 85% sequence identity to SEQ ID NO:564.

21. The non-viral nucleic acid vector of claim 19, wherein the encoded SV40 large T antigen is modified to reduce its cellular transforming activity to reduce or eliminate binding to p53, HSP70 or Rb.

22. The non-viral nucleic acid vector of claim 21, wherein the encoded modified SV40 large T antigen comprises an amino acid replacement at an amino acid residue selected from among L17, G18, L19, E20, R21, S22, A23, W24, G25, N26, I27, P28, L29, M30, R31, K32, L103, C105, E107, E108, S112, S189, N366, D367, L368, L369, D370, D402, T434, L435, A436, A437, A438, L439, L440, E441, L442, C443, G444, P453, V585, D604, S677 or S679 corresponding to positions set forth in SEQ ID NO:564.

23. The non-viral nucleic acid vector of claim 22, wherein the encoded modified SV40 large T antigen comprises an amino acid replacement selected from among L19F, P28S, L103P, C105A, E107K, E107L, E108L, S112N, S189N, D402R, D402E, P453S, V585R, D604R, S677A and S679A.

24. The non-viral nucleic acid vector of claim 23, wherein the encoded modified SV40 large T antigen comprises an amino acid replacement selected from among E107L/E108L; E107L/E108L/D402R; E107L/E108L/P453S; E107L/E108L/V585R; E107L/E108L/D604R; L19F/E107L/E108L/D402R; L19F/E107L/E108L/P453S; L19F/E107L/E108L/V585R; L19F/E107L/E108L/D604R; P28S/E107L/E108L/D402R; P28S/E107L/E108L/P453S; P28S/E107L/E108L/V585R; P28S/E107L/E108L/V604R; L19F/P28S/L103P/C105A/E107L/E108L/V585R; L19F/P28S/L103P/C105A/E107L/E108L/D604R; L103P/C105A; L103P/E107K; C105A/E107K; C105A/D402E; C105A/V585R; E107K/V585R; E107K/D402E; L103P/D402E and L103P/V585R.

25. The non-viral nucleic acid vector of claim 24, wherein the second open reading frame codes for a replication initiator protein that is an SV40 large T antigen comprising the sequence of amino acids set forth in any of SEQ ID NOS: 565-604, or a sequence of amino acids that exhibits at least 85% sequence identity to any of SEQ ID NOS: 565-604.

26. The non-viral nucleic acid vector of claim 1, wherein the encoded fusogenic protein is a fusogenic protein that is a viral or eukaryotic fusogenic protein.

27. The non-viral nucleic acid vector of claim 26, wherein the fusogenic protein is selected from among VSV-G (Vesicular stomatitis virus G protein), MV (Measles virus) F protein, SIV (Simian immunodeficiency virus) F protein, HIV (Human immunodeficiency virus) 1+2 F protein, MuLV (Murine leukemia virus) F protein, Chicken LV Env Protein, SER virus F protein, NDV (Newcastle disease virus) F protein, GALV (Gibbon ape leukemia virus) F protein, SV5 (Simian virus 5) F protein, PPRV-F protein, Mumps F protein, Sendai virus F protein, Human parainfluenza virus types 1 (HPIV 1) F protein, HPIV 2 F protein, HPIV 3 F protein, CDV (Canine distemper virus) F protein, R'Pest F protein, SV41 (Simian virus 41) F protein, HRSV (Human respiratory syncytial virus) F protein, Human endogenous retroviral-3 (HERV-3), Reovirus FAST proteins, Avian Reovirus p10, Avian Reovirus p10 (S1133 variant V68I), Reptilian Reovirus p14, Baboon Reovirus p15, Eukaryotic Membrane Fusion Proteins, EFF-1, AFF-1, Tetraspanin Proteins, Yeast G Protein, Syncytin 1, Syncytin 2, Syntaxin (SNARE) and SNAP25 (SNARE), Synaptobrevin (SNARE) and variants thereof that exhibit fusogenic activity.

28. The non-viral nucleic acid vector of claim 27, wherein:
the first open reading frame coding for a fusogenic protein comprises the sequence of nucleotides set forth in SEQ ID NO: 6, 8, 10, 12, 14, 15, 17 or 27 or a sequence that exhibits at least 80% sequence identity thereto; or
the first open reading frame encodes a fusogenic protein comprising the sequence of amino acids set forth in SEQ ID NO: 38, 39, 40, 41, 42, 43, 44 or 53 or a sequence of amino acids that exhibits at least 85% sequence identity thereto.

29. The non-viral nucleic acid vector of claim 1, wherein the open reading frame coding for a fusogenic protein is modified to remove CpG motifs, is human codon-optimized and/or is modified in the N-terminal fusogenic peptide of the F1 subunit to increase the fusogenic activity of the encoded fusogenic protein.

30. The non-viral nucleic acid vector of claim 29, wherein the first open reading frame coding for a fusogenic protein comprises the sequence of nucleotides set forth in SEQ ID NO:7, 9, 11, 13, 16, 18 or a sequence that exhibits at least 85% sequence identity thereto.

31. The non-viral nucleic acid vector of claim 29, wherein the fusogenic protein is modified in the N-terminal fusogenic peptide of the F1 subunit and the modification is an amino acid replacement of at least one Glycine residue with an Alanine.

32. The non-viral nucleic acid vector of claim 31, wherein the encoded fusogenic protein is a modified SV5F protein that comprises an amino acid replacement in the F1 subunit at an amino acid residue selected from among 105, 109 and 115 corresponding to positions set forth in SEQ ID NO:44.

33. The non-viral nucleic acid vector of claim 32, wherein the encoded modified SV5F fusogenic protein comprises an amino acid replacement selected from among G105A, G109A and G114A.

34. The non-viral nucleic acid vector of claim 33, wherein the encoded modified SV5F fusogenic protein comprises an amino acid replacement selected from among G105A/G109A, G105A/G114A, G109A/G114A and G105A/G109A/G114A.

35. The non-viral nucleic acid vector of claim 33, wherein:
the first open reading frame coding for a fusogenic protein comprises the sequence of nucleotides set forth in SEQ ID NO:19-25 or a sequence that exhibits at least 85% sequence identity thereto; or
the first open reading frame encodes a fusogenic protein that has the sequence of amino acids set forth in SEQ ID NO: 45-51 or a sequence of amino acids that exhibits at least 85% sequence identity thereto.

36. The non-viral nucleic acid vector of claim 27, wherein the encoded fusogenic protein is a modified Ser virus F protein comprising an amino acid replacement selected from among L539A, L548A, L548V and L548G corresponding to positions set forth in SEQ ID NO:53.

37. The non-viral nucleic acid vector of claim 3, wherein the promoter is a constitutive promoter, a tissue-specific promoter or a cell-specific promoter.

38. The non-viral nucleic acid vector of claim 37, wherein the promoter is a CMV promoter.

39. The non-viral nucleic acid vector of claim 37, wherein the promoter is a cell-specific promoter selected from among endothelial nitric oxide synthase (eNOS) promoter; vascular endothelial growth factor (VEGF) receptor (flk1) promoter; insulin promoter; promoter of gonadotropin-releasing hormone receptor gene; matrix metalloproteinase 9 promoter; promoter of parathyroid hormone receptor; and dopamine beta-hydroxylase promoter.

40. The non-viral nucleic acid vector of claim 37, wherein the promoter is a tumor-specific promoter.

41. The non-viral nucleic acid vector of claim 40, wherein the tumor-specific promoter is a cell-cycle dependent promoter.

42. The non-viral nucleic acid vector of claim 41, wherein the promoter is selected from among cycA, cdc2, cdc25, B-myb, E2F-1, p107, HsOrc1, adenoE1A, cyclin B1, cyclin B2, Cdc2, and topoisomerase IIα.

43. The non-viral nucleic acid vector of claim 42, wherein the promoter is an E2F-1 promoter comprising the sequence of nucleotides set forth as nucleotides 37 to 303 of SEQ ID NO:506, as nucleotides 1194 to 1460 of SEQ ID NO: 483 or as nucleotides set forth in SEQ ID NO:534 or 535 or a variant sequence thereof that exhibits at least 85% sequence identity thereto.

44. The non-viral nucleic acid vector of claim 43, wherein the promoter is modified to remove CpG motifs, to reduce the promoter strength, to enhance the promoter strength, to reduce expression levels of the encoded protein or to increase expression levels of the encoded protein.

45. The non-viral nucleic acid vector of claim 44, wherein the promoter is modified by addition or insertion of an enhancer element selected from among SP-1, CAT box or CHR element.

46. The non-viral nucleic acid vector of claim 44, wherein the promoter is an E2F-1 promoter comprising the sequence of nucleotides set forth in one of SEQ ID NO:536-541 or a variant sequence thereof that exhibits at least 85% sequence identity thereto.

47. The non-viral nucleic acid vector of claim 1, wherein episomal replication occurs specifically in a tumor cell and not in a normal cell.

48. The non-viral nucleic acid vector of claim 1, comprising an open reading frame coding for an adjunct therapy protein or second bystander product.

49. The non-viral nucleic acid vector of claim 48, wherein the adjunct therapy protein or second bystander product is selected from among a protein that induces apoptosis, a toxin, a prodrug modifying protein, a protein that interferes with a signal transduction cascade involved with cellular survival or proliferation, an immunomodulatory protein and an angiogenesis inhibitor.

50. The non-viral nucleic acid vector of claim 49, wherein the adjunct therapy protein or second bystander protide is a prodrug modifying protein that is herpes simplex 1 thymidine kinase gene (HSV-TK), cytosine deaminase (CD) or cytochrome p450.

51. The non-viral nucleic acid vector of 50, wherein:
the open reading frame coding for a prodrug modifying protein encodes a prodrug modifying protein comprising the sequence of amino acids set forth in SEQ ID NO:501 or SEQ ID NO:502 or a variant sequence thereof that exhibits at least 85% sequence identity thereto; or
the open reading frame coding for a prodrug modifying protein comprises the sequence of nucleotides set forth in SEQ ID NO: 498 or 500 or a variant sequence thereof that exhibits at least 85% sequence identity thereto.

52. The non-viral nucleic acid vector of claim 50, wherein the open reading frame coding for a prodrug modifying protein is modified to remove CpG motifs and/or is humanized.

53. The non-viral nucleic acid vector of claim 52, wherein the open reading frame coding for a prodrug modifying protein comprises the sequence of nucleotides set forth in SEQ ID NO:499 or a variant sequence thereof that exhibits at least 85% sequence identity thereto.

54. The non-viral nucleic acid vector of claim 48, wherein the adjunct therapy gene is selected from among a cytokine and a chemokine.

55. The non-viral nucleic acid vector of claim 48, wherein the nucleic acid molecule comprises at least one promoter that is operatively linked to control expression of the first open reading frame, second open reading frame and/or the open reading frame coding for a second bystander product or adjunct therapy gene.

56. The non-viral nucleic acid vector of claim 1, comprising an open reading frame coding for a reporter protein.

57. The non-viral nucleic acid vector of claim 56, wherein the reporter protein is selected from among chloramphenicol acetyl transferase (CAT), β-galactosidase, luciferase, alkaline phosphatase, a fluorescent protein, and horse radish peroxidase, and an antibiotic resistance marker.

58. The non-viral nucleic acid vector of claim 56, wherein the nucleic acid molecule comprises at least one promoter that is operatively linked to control expression of the first open reading frame, second open reading frame and/or the open reading frame coding for a reporter protein.

59. The non-viral nucleic acid vector of claim 1, wherein the first and/or second open reading frame is operatively linked to one or more regulatory elements to control expression of the gene.

60. The non-viral nucleic acid vector of claim 59, wherein the regulatory element is a polyadenylation signal or an internal promoter.

61. The non-viral nucleic acid vector of claim 1, comprising:
a) a promoter that controls expression of the first and second open-reading frame;
b) a first open reading frame coding for a fusogenic protein or variant thereof that exhibits fusogenic activity;
c) an IRES;
d) a second open reading frame coding for a replication initiator or variant thereof that binds the origin of replication; and
e) an origin of replication or variant thereof that is compatible with the replication initiator to initiate replication of DNA from the replication initiator or variant thereof, whereby the replication initiator activates the origin of replication for episomal replication, wherein:
the first open reading frame is positioned before the second open reading frame in the nucleic acid molecule; or
the second open reading frame is positioned before the first open reading frame in the nucleic acid molecule.

62. The non-viral nucleic acid vector of claim 61, comprising the sequence of nucleotides set forth in SEQ ID NO: 647, 649, 651, 653, 655, 657, 659-663, 693, 700-705, 722 or 727 or a sequence of nucleotides that exhibits at least 85% sequence identity to any of SEQ ID NO: 647, 649, 651, 653, 655, 657, 659-663, 693, 700-705, 722 or 727.

63. A non-viral nucleic acid vector, comprising:
a) an origin of replication;
b) a first open reading frame coding for a prodrug converting enzyme; and
c) a second open reading frame coding for a replication initiator protein that activates the origin of replication for episomal replication of the vector in a cell in which it is expressed.

64. The non-viral nucleic acid vector of claim 63, comprising:
a) a promoter that controls expression of the first and second open-reading frame;
b) a first open reading frame coding for a prodrug converting enzyme or variant thereof;
c) an IRES;
d) a second open reading frame coding for a replication initiator or variant thereof that binds the origin of replication; and
e) an origin of replication or variant thereof that is compatible with the replication initiator to initiate replication of DNA from the replication initiator or variant thereof, whereby the replication initiator activates the origin of replication for episomal replication, wherein:
the first open reading frame is positioned before the second open reading frame in the nucleic acid molecule; or
the second open reading frame is positioned before the first open reading frame in the nucleic acid molecule.

65. The non-viral nucleic acid vector of claim 63, wherein the prodrug modifying protein is herpes simplex 1 thymidine kinase gene (HSV-TK), cytosine deaminase (CD) or cytochrome p450.

66. The non-viral nucleic acid vector of claim 63, wherein the origin of replication and replication initiator are selected from among:
a) an SV40 origin and an SV40 T antigen;
b) a BKV origin and BKV large T antigen;
c) a BKV origin and SV40 T antigen; and
c) an EBV origin and Epstein Barr virus Nuclear Antigen (EBNA).

67. The non-viral nucleic acid vector of claim 66, wherein the origin of replication is an SV40 origin or variant thereof and the replication initiator is an SV40 T antigen or variant thereof.

68. The non-viral nucleic acid vector of claim 63, comprising the sequence of nucleotides set forth in SEQ ID NO: 664 or 724 or a sequence of nucleotides that exhibits at least 80% sequence identity to SEQ ID NO: 664 or 724.

69. The non-viral nucleic acid vector of claim 1 that is a naked DNA.

70. A nanoparticle, comprising the non-viral nucleic acid vector of claim 1.

71. A nanoparticle, comprising the non-viral nucleic acid vector of claim 63.

72. The nanoparticle of claim 70 that is conjugated to a protein that targets a tumor.

73. The nanoparticle of claim 71 that is conjugated to a protein that targets a tumor.

74. A method of treating cancer, comprising administering a non-viral nucleic acid vector of claim 1 to a subject that has a cancer.

75. The method of treatment of claim 74, wherein the cancer is selected from among a sarcomas, mesothelioma, carcinoids, melanoma, neuroblastoma, retinoblastoma, osteosarcoma, and cancers of the lung, colon, esophagus, ovary, pancreas, skin, stomach, head and neck, bladder, prostate, liver, brain, adrenal gland, breast, endometrium, kidney, thyroid, parathyroid, cervix, bone, eye and hematological system.

76. The method of treatment of claim 74, further comprising treating the subject by a targeted therapy, chemotherapy, radiotherapy, immunotherapy, hormonal therapy, cryotherapy or surgery.

77. A method of treating cancer, comprising administering a non-viral nucleic acid vector of claim 63 to a subject that has a cancer.

78. The method of treatment of claim 77, wherein the cancer is selected from among a sarcomas, mesothelioma, carcinoids, melanoma, neuroblastoma, retinoblastoma, osteosarcoma, and cancers of the lung, colon, esophagus, ovary, pancreas, skin, stomach, head and neck, bladder, prostate, liver, brain, adrenal gland, breast, endometrium, kidney, thyroid, parathyroid, cervix, bone, eye and hematological system.

79. The method of treatment of claim 77, further comprising treating the subject by a targeted therapy, chemotherapy, radiotherapy, immunotherapy, hormonal therapy, cryotherapy or surgery.

The application's sequence listing, which the Patent Office published only in electronic form, follows.

SEQUENCE LISTING (734 sequences)

SEQ ID NO: 1 - DNA, 5308 bp, Artificial Sequence
  pIRES2-EGFP Vector
tagttattaatagtaatcaattacggggtcattagttcatagcccatatatggagttccgcgttacataacttacggtaaatggcccgcctggctgaccgcccaacgacccccgcccattgacgtcaataatgacgtatgttcccatagtaacgccaatagggactttccattgacgtcaatgggtggagtatttacggtaaactgcccacttggcagtacatcaagtgtatcatatgccaagtacgccccctattgacgtcaatgacggtaaatggcccgcctggcattatgcccagtacatgaccttatgggactttcctacttggcagtacatctacgtattagtcatcgctattaccatggtgatgcggttttggcagtacatcaatgggcgtggatagcggtttgactcacggggatttccaagtctccaccccattgacgtcaatgggagtttgttttggcaccaaaatcaacgggactttccaaaatgtcgtaacaactccgccccattgacgcaaatgggcggtaggcgtgtacggtgggaggtctatataagcagagctggtttagtgaaccgtcagatccgctagcgctaccggactcagatctcgagctcaagcttcgaattctgcagtcgacggtaccgcgggcccgggatccgcccctctccctcccccccccctaacgttactggccgaagccgcttggaataaggccggtgtgcgtttgtctatatgttattttccaccatattgccgtcttttggcaatgtgagggcccggaaacctggccctgtcttcttgacgagcattcctaggggtctttcccctctcgccaaaggaatgcaaggtctgttgaatgtcgtgaaggaagcagttcctctggaagcttcttgaagacaaacaacgtctgtagcgaccctttgcaggcagcggaaccccccacctggcgacaggtgcctctgcggccaaaagccacgtgtataagatacacctgcaaaggcggcacaaccccagtgccacgttgtgagttggatagttgtggaaagagtcaaatggctctcctcaagcgtattcaacaaggggctgaaggatgcccagaaggtaccccattgtatgggatctgatctggggcctcggtgcacatgctttacatgtgtttagtcgaggttaaaaaaacgtctaggccccccgaaccacggggacgtggttttcctttgaaaaacacgatgataatatggccacaaccatggtgagcaagggcgaggagctgttcaccggggtggtgcccatcctggtcgagctggacggcgacgtaaacggccacaagttcagcgtgtccggcgagggcgagggcgatgccacctacggcaagctgaccctgaagttcatctgcaccaccggcaagctgcccgtgccctggcccaccctcgtgaccaccctgacctacggcgtgcagtgcttcagccgctaccccgaccacatgaagcagcacgacttcttcaagtccgccatgcccgaaggctacgtccaggagcgcaccatcttcttcaaggacgacggcaactacaagacccgcgccgaggtgaagttcgagggcgacaccctggtgaaccgcatcgagctgaagggcatcgacttcaaggaggacggcaacatcctggggcacaagctggagtacaactacaacagccacaacgtctatatcatggccgacaagcagaagaacggcatcaaggtgaacttcaagatccgccacaacatcgaggacggcagcgtgcagctcgccgaccactaccagcagaacacccccatcggcgacggccccgtgctgctgcccgacaaccactacctgagcacccagtccgccctgagcaaagaccccaacgagaagcgcgatcacatggtcctgctggagttcgtgaccgccgccgggatcactctcggcatggacgagctgtacaagtaaagcggccgcgactctagatcataatcagccataccacatttgtagaggttttacttgctttaaaaaacctcccacacctccccctgaacctgaaacataaaatgaatgcaattgttgttgttaacttgtttattgcagcttataatggttacaaataaagcaatagcatcacaaatttcacaaataaagcatttttttcactgcattctagttgtggtttgtccaaactcatcaatgtatcttaaggcgtaaattgtaagcgttaatattttgttaaaattcgcgttaaatttttgttaaatcagctcattttttaaccaataggccgaaatcggcaaaatcccttataaatcaaaagaatagaccgagatagggttgagtgttgttccagtttggaacaagagtccactattaaagaacgtggactccaacgtcaaagggcgaaaaaccgtctatcagggcgatggcccactacgtgaaccatcaccctaatcaagttttttggggtcgaggtgccgtaaagcactaaatcggaaccctaaagggagcccccgatttagagcttgacggggaaagccggcgaacgtggcgagaaaggaagggaagaaagcgaaaggagcgggcgctagggcgctggcaagtgtagcggtcacgctgcgcgtaaccaccacacccgccgcgcttaatgcgccgctacagggcgcgtcaggtggcacttttcggggaaatgtgcgcggaacccctatttgtttatttttctaaatacattcaaatatgtatccgctcatgagacaataaccctgataaatgcttcaataatattgaaaaaggaagagtcctgaggcggaaagaaccagctgtggaatgtgtgtcagttagggtgtggaaagtccccaggctccccagcaggcagaagtatgcaaagcatgcatctcaattagtcagcaaccaggtgtggaaagtccccaggctccccagcaggcagaagtatgcaaagcatgcatctcaattagtcagcaaccatagtcccgcccctaactccgcccatcccgcccctaactccgcccagttccgcccattctccgccccatggctgactaattttttttatttatgcagaggccgaggccgcctcggcctctgagctattccagaagtagtgaggaggcttttttggaggcctaggcttttgcaaagatcgatcaagagacaggatgaggatcgtttcgcatgattgaacaagatggattgcacgcaggttctccggccgcttgggtggagaggctattcggctatgactgggcacaacagacaatcggctgctctgatgccgccgtgttccggctgtcagcgcaggggcgcccggttctttttgtcaagaccgacctgtccggtgccctgaatgaactgcaagacgaggcagcgcggctatcgtggctggccacgacgggcgttccttgcgcagctgtgctcgacgttgtcactgaagcgggaagggactggctgctattgggcgaagtgccggggcaggatctcctgtcatctcaccttgctcctgccgagaaagtatccatcatggctgatgcaatgcggcggctgcatacgcttgatccggctacctgcccattcgaccaccaagcgaaacatcgcatcgagcgagcacgtactcggatggaagccggtcttgtcgatcaggatgatctggacgaagagcatcaggggctcgcgccagccgaactgttcgccaggctcaaggcgagcatgcccgacggcgaggatctcgtcgtgacccatggcgatgcctgcttgccgaatatcatggtggaaaatggccgcttttctggattcatcgactgtggccggctgggtgtggcggaccgctatcaggacatagcgttggctacccgtgatattgctgaagagcttggcggcgaatgggctgaccgcttcctcgtgctttacggtatcgccgctcccgattcgcagcgcatcgccttctatcgccttcttgacgagttcttctgagcgggactctggggttcgaaatgaccgaccaagcgacgcccaacctgccatcacgagatttcgattccaccgccgccttctatgaaaggttgggcttcggaatcgttttccgggacgccggctggatgatcctccagcgcggggatctcatgctggagttcttcgcccaccctagggggaggctaactgaaacacggaaggagacaataccggaaggaacccgcgctatgacggcaataaaaagacagaataaaacgcacggtgttgggtcgtttgttcataaacgcggggttcggtcccagggctggcactctgtcgataccccaccgagaccccattggggccaatacgcccgcgtttcttccttttccccaccccaccccccaagttcgggtgaaggcccagggctcgcagccaacgtcggggcggcaggccctgccatagcctcaggttactcatatatactttagattgatttaaaacttcatttttaatttaaaaggatctaggtgaagatcctttttgataatctcatgaccaaaatcccttaacgtgagttttcgttccactgagcgtcagaccccgtagaaaagatcaaaggatcttcttgagatcctttttttctgcgcgtaatctgctgcttgcaaacaaaaaaaccaccgctaccagcggtggtttgtttgccggatcaagagctaccaactctttttccgaaggtaactggcttcagcagagcgcagataccaaatactgtccttctagtgtagccgtagttaggccaccacttcaagaactctgtagcaccgcctacatacctcgctctgctaatcctgttaccagtggctgctgccagtggcgataagtcgtgtcttaccgggttggactcaagacgatagttaccggataaggcgcagcggtcgggctgaacggggggttcgtgcacacagcccagcttggagcgaacgacctacaccgaactgagatacctacagcgtgagctatgagaaagcgccacgcttcccgaagggagaaaggcggacaggtatccggtaagcggcagggtcggaacaggagagcgcacgagggagcttccagggggaaacgcctggtatctttatagtcctgtcgggtttcgccacctctgacttgagcgtcgatttttgtgatgctcgtcaggggggcggagcctatggaaaaacgccagcaacgcggcctttttacggttcctggccttttgctggccttttgctcacatgttctttcctgcgttatcccctgattctgtggataaccgtattaccgccatgcat

SEQ ID NO: 2 - DNA, 3904 bp, Artificial Sequence
  Backbone Intermediate Vector 1
tagttattaatagtaatcaattacggggtcattagttcatagcccatatatggagttccgcgttacataacttacggtaaatggcccgcctggctgaccgcccaacgacccccgcccattgacgtcaataatgacgtatgttcccatagtaacgccaatagggactttccattgacgtcaatgggtggagtatttacggtaaactgcccacttggcagtacatcaagtgtatcatatgccaagtacgccccctattgacgtcaatgacggtaaatggcccgcctggcattatgcccagtacatgaccttatgggactttcctacttggcagtacatctacgtattagtcatcgctattaccatggtgatgcggttttggcagtacatcaatgggcgtggatagcggtttgactcacggggatttccaagtctccaccccattgacgtcaatgggagtttgttttggcaccaaaatcaacgggactttccaaaatgtcgtaacaactccgccccattgacgcaaatgggcggtaggcgtgtacggtgggaggtctatataagcagagctggtttagtgaaccgtcagatccgctagcgctaccggactcagatctcgagctcaagcttcgaattctgcagtcgacggtaccgcgggcccgggatccgcccctctccctcccccccccctaacgttactggccgaagccgcttggaataaggccggtgtgcgtttgtctatatgttattttccaccatattgccgtcttttggcaatgtgagggcccggaaacctggccctgtcttcttgacgagcattcctaggggtctttcccctctcgccaaaggaatgcaaggtctgttgaatgtcgtgaaggaagcagttcctctggaagcttcttgaagacaaacaacgtctgtagcgaccctttgcaggcagcggaaccccccacctggcgacaggtgcctctgcggccaaaagccacgtgtataagatacacctgcaaaggcggcacaaccccagtgccacgttgtgagttggatagttgtggaaagagtcaaatggctctcctcaagcgtattcaacaaggggctgaaggatgcccagaaggtaccccattgtatgggatctgatctggggcctcggtgcacatgctttacatgtgtttagtcgaggttaaaaaaacgtctaggccccccgaaccacggggacgtggttttcctttgaaaaacacgatgataatatggccacaaccatggtgagcaagggcgaggagctgttcaccggggtggtgcccatcctggtcgagctggacggcgacgtaaacggccacaagttcagcgtgtccggcgagggcgagggcgatgccacctacggcaagctgaccctgaagttcatctgcaccaccggcaagctgcccgtgccctggcccaccctcgtgaccaccctgacctacggcgtgcagtgcttcagccgctaccccgaccacatgaagcagcacgacttcttcaagtccgccatgcccgaaggctacgtccaggagcgcaccatcttcttcaaggacgacggcaactacaagacccgcgccgaggtgaagttcgagggcgacaccctggtgaaccgcatcgagctgaagggcatcgacttcaaggaggacggcaacatcctggggcacaagctggagtacaactacaacagccacaacgtctatatcatggccgacaagcagaagaacggcatcaaggtgaacttcaagatccgccacaacatcgaggacggcagcgtgcagctcgccgaccactaccagcagaacacccccatcggcgacggccccgtgctgctgcccgacaaccactacctgagcacccagtccgccctgagcaaagaccccaacgagaagcgcgatcacatggtcctgctggagttcgtgaccgccgccgggatcactctcggcatggacgagctgtacaagtaaagcggccgcgacctggttgttaattaaattgacatatctacctaatttgtgtataataaccctgataaatgcttcaataatattgaaaaaggaagagtcctgtataaaaagaaccagctgtggaatgtgtgtcagttagtaggcttatgcaaagtagcccgcccaagagacaggctgaggcccgcccaccatgatagaacaagatggacttcatgctggatctcctgcagcatgggtggaaagactttttggttatgattgggctcagcagaccattggatgttctgatgctgctgtgttcaggcttagtgcacagggtaggccagtgctctttgtgaagaccgatctctctggagctttgaatgaactgcaggatgaggctgctaggctttcatggctggccaccacaggtgtcccttgtgctgcagtgttggatgtggttactgaggctgggagggattggctcctcctgggagaagtgccaggtcaggatctgttgagttctcacctggctccagctgaaaaagtctccataatggcagatgctatgagaaggctgcacacattggacccagctacatgcccatttgaccatcaggccaaacacaggattgagagggccagaacaagaatggaggctgggttggtggaccaggatgaccttgatgaggagcatcagggcctggctccagctgaattgtttgccaggctcaaggctagtatgcctgatggggaggatctggtggtaactcatggtgatgcctgtttgcctaacatcatggtggaaaatggaaggttctctggattcattgattgtggaagactgggtgtagctgacaggtatcaggacatagctcttgcaacaagggatattgcagaggagttgggtggagaatgggctgacaggttcctggtcttgtatggcattgctgccccagacagccaaagaattgctttctataggctgttggatgagtttttctaagctcagcacccacaaagctctcaggtcctaagagacactggcacccatatccatgcatcccttgtataaataaagcatccagcaaagctggtaccatgtaaaactgtcttggttgtttccaaggtatagagcatagctcaataggtttttgactttgtcttagatcttcatgaccaaaatcccttaacgtgagttttcgttccactgagcgtcagaccccgtagaaaagatcaaaggatcttcttgagatcctttttttctgcgcgtaatctgctgcttgcaaacaaaaaaaccaccgctaccagcggtggtttgtttgccggatcaagagctaccaactctttttccgaaggtaactggcttcagcagagcgcagataccaaatactgtccttctagtgtagccgtagttaggccaccacttcaagaactctgtagcaccgcctacatacctcgctctgctaatcctgttaccagtggctgctgccagtggcgataagtcgtgtcttaccgggttggactcaagacgatagttaccggataaggcgcagcggtcgggctgaacggggggttcgtgcacacagcccagcttggagcgaacgacctacaccgaactgagatacctacagcgtgagctatgagaaagcgccacgcttcccgaagggagaaaggcggacaggtatccggtaagcggcagggtcggaacaggagagcgcacgagggagcttccagggggaaacgcctggtatctttatagtcctgtcgggtttcgccacctctgacttgagcgtcgatttttgtgatgctcgtcaggggggcggagcctatggaaaaacgccagcaacgcggcctttttacggttcctggccttttgctggccttttgctcacatgttctttcctgcgttatcccctgattctgtggataaccgtattaccgccatgcat

SEQ ID NO: 3 - DNA, 4293 bp, Artificial Sequence
  Backbone Intermediate Vector 2
tagttattaatagtaatcaattacggggtcattagttcatagcccatatatggagttccgcgttacataacttacggtaaatggcccgcctggctgaccgcccaacgacccccgcccattgacgtcaataatgacgtatgttcccatagtaacgccaatagggactttccattgacgtcaatgggtggagtatttacggtaaactgcccacttggcagtacatcaagtgtatcatatgccaagtacgccccctattgacgtcaatgacggtaaatggcccgcctggcattatgcccagtacatgaccttatgggactttcctacttggcagtacatctacgtattagtcatcgctattaccatggtgatgcggttttggcagtacatcaatgggcgtggatagcggtttgactcacggggatttccaagtctccaccccattgacgtcaatgggagtttgttttggcaccaaaatcaacgggactttccaaaatgtcgtaacaactccgccccattgacgcaaatgggcggtaggcgtgtacggtgggaggtctatataagcagagctggtttagtgaaccgtcagatccgctagcgctaccggactcagatctcgagctcaagcttcgaattctgcagtcgacggtaccgcgggcccgggatccgcccctctccctcccccccccctaacgttactggccgaagccgcttggaataaggccggtgtgcgtttgtctatatgttattttccaccatattgccgtcttttggcaatgtgagggcccggaaacctggccctgtcttcttgacgagcattcctaggggtctttcccctctcgccaaaggaatgcaaggtctgttgaatgtcgtgaaggaagcagttcctctggaagcttcttgaagacaaacaacgtctgtagcgaccctttgcaggcagcggaaccccccacctggcgacaggtgcctctgcggccaaaagccacgtgtataagatacacctgcaaaggcggcacaaccccagtgccacgttgtgagttggatagttgtggaaagagtcaaatggctctcctcaagcgtattcaacaaggggctgaaggatgcccagaaggtaccccattgtatgggatctgatctggggcctcggtgcacatgctttacatgtgtttagtcgaggttaaaaaaacgtctaggccccccgaaccacggggacgtggttttcctttgaaaaacacgatgataatatggccacaaccatggtgagcaagggcgaggagctgttcaccggggtggtgcccatcctggtcgagctggacggcgacgtaaacggccacaagttcagcgtgtccggcgagggcgagggcgatgccacctacggcaagctgaccctgaagttcatctgcaccaccggcaagctgcccgtgccctggcccaccctcgtgaccaccctgacctacggcgtgcagtgcttcagccgctaccccgaccacatgaagcagcacgacttcttcaagtccgccatgcccgaaggctacgtccaggagcgcaccatcttcttcaaggacgacggcaactacaagacccgcgccgaggtgaagttcgagggcgacaccctggtgaaccgcatcgagctgaagggcatcgacttcaaggaggacggcaacatcctggggcacaagctggagtacaactacaacagccacaacgtctatatcatggccgacaagcagaagaacggcatcaaggtgaacttcaagatccgccacaacatcgaggacggcagcgtgcagctcgccgaccactaccagcagaacacccccatcggcgacggccccgtgctgctgcccgacaaccactacctgagcacccagtccgccctgagcaaagaccccaacgagaagcgcgatcacatggtcctgctggagttcgtgaccgccgccgggatcactctcggcatggacgagctgtacaagtaaagcggccgcgactctagatcataatcagccataccacacctccccctgaacctgaaaaatcaatgcaattattgttgaaataaagcacccagcaatgcctgggaccatgtaaaactgtcctggttctttccaaggtatagagcatagcccacaggctgatatttctggccagggttggttggaggacagccttgtctataggaagagaatgaggtttttgcactataagggcatgcaagtcagtcccgcccctaactccacctggttgcccatcccgcccctaactccgcccagttccgcccattctccgccccatggctgactaattttttttatttatgcagaggcggaggccgcctcggcctctgagctattccagaagtagtgaggaggcttttttggaggcccttaattaaattgacatatctacctaatttgtgtataataaccctgataaatgcttcaataatattgaaaaaggaagagtcctgtataaaaagaaccagctgtggaatgtgtgtcagttagtaggcttatgcaaagtagcccgcccaagagacaggctgaggcccgcccaccatgatagaacaagatggacttcatgctggatctcctgcagcatgggtggaaagactttttggttatgattgggctcagcagaccattggatgttctgatgctgctgtgttcaggcttagtgcacagggtaggccagtgctctttgtgaagaccgatctctctggagctttgaatgaactgcaggatgaggctgctaggctttcatggctggccaccacaggtgtcccttgtgctgcagtgttggatgtggttactgaggctgggagggattggctcctcctgggagaagtgccaggtcaggatctgttgagttctcacctggctccagctgaaaaagtctccataatggcagatgctatgagaaggctgcacacattggacccagctacatgcccatttgaccatcaggccaaacacaggattgagagggccagaacaagaatggaggctgggttggtggaccaggatgaccttgatgaggagcatcagggcctggctccagctgaattgtttgccaggctcaaggctagtatgcctgatggggaggatctggtggtaactcatggtgatgcctgtttgcctaacatcatggtggaaaatggaaggttctctggattcattgattgtggaagactgggtgtagctgacaggtatcaggacatagctcttgcaacaagggatattgcagaggagttgggtggagaatgggctgacaggttcctggtcttgtatggcattgctgccccagacagccaaagaattgctttctataggctgttggatgagtttttctaagctcagcacccacaaagctctcaggtcctaagagacactggcacccatatccatgcatcccttgtataaataaagcatccagcaaagctggtaccatgtaaaactgtcttggttgtttccaaggtatagagcatagctcaataggtttttgactttgtcttagatcttcatgaccaaaatcccttaacgtgagttttcgttccactgagcgtcagaccccgtagaaaagatcaaaggatcttcttgagatcctttttttctgcgcgtaatctgctgcttgcaaacaaaaaaaccaccgctaccagcggtggtttgtttgccggatcaagagctaccaactctttttccgaaggtaactggcttcagcagagcgcagataccaaatactgtccttctagtgtagccgtagttaggccaccacttcaagaactctgtagcaccgcctacatacctcgctctgctaatcctgttaccagtggctgctgccagtggcgataagtcgtgtcttaccgggttggactcaagacgatagttaccggataaggcgcagcggtcgggctgaacggggggttcgtgcacacagcccagcttggagcgaacgacctacaccgaactgagatacctacagcgtgagctatgagaaagcgccacgcttcccgaagggagaaaggcggacaggtatccggtaagcggcagggtcggaacaggagagcgcacgagggagcttccagggggaaacgcctggtatctttatagtcctgtcgggtttcgccacctctgacttgagcgtcgatttttgtgatgctcgtcaggggggcggagcctatggaaaaacgccagcaacgcggcctttttacggttcctggccttttgctggccttttgctcacatgttctttcctgcgttatcccctgattctgtggataaccgtattaccgccatgcat

SEQ ID NO: 4 - DNA, 3517 bp, Artificial Sequence
  Backbone Intermediate Vector 3
gcccctctccctcccccccccctaacgttactggccgaagccgcttggaataaggccggtgtgcgtttgtctatatgttattttccaccatattgccgtcttttggcaatgtgagggcccggaaacctggccctgtcttcttgacgagcattcctaggggtctttcccctctcgccaaaggaatgcaaggtctgttgaatgtcgtgaaggaagcagttcctctggaagcttcttgaagacaaacaacgtctgtagcgaccctttgcaggcagcggaaccccccacctggcgacaggtgcctctgcggccaaaagccacgtgtataagatacacctgcaaaggcggcacaaccccagtgccacgttgtgagttggatagttgtggaaagagtcaaatggctctcctcaagcgtattcaacaaggggctgaaggatgcccagaaggtaccccattgtatgggatctgatctggggcctcggtgcacatgctttacatgtgtttagtcgaggttaaaaaaacgtctaggccccccgaaccacggggacgtggttttcctttgaaaaacacgatgataatatggccacaaccatggtgagcaagggcgaggagctgttcaccggggtggtgcccatcctggtcgagctggacggcgacgtaaacggccacaagttcagcgtgtccggcgagggcgagggcgatgccacctacggcaagctgaccctgaagttcatctgcaccaccggcaagctgcccgtgccctggcccaccctcgtgaccaccctgacctacggcgtgcagtgcttcagccgctaccccgaccacatgaagcagcacgacttcttcaagtccgccatgcccgaaggctacgtccaggagcgcaccatcttcttcaaggacgacggcaactacaagacccgcgccgaggtgaagttcgagggcgacaccctggtgaaccgcatcgagctgaagggcatcgacttcaaggaggacggcaacatcctggggcacaagctggagtacaactacaacagccacaacgtctatatcatggccgacaagcagaagaacggcatcaaggtgaacttcaagatccgccacaacatcgaggacggcagcgtgcagctcgccgaccactaccagcagaacacccccatcggcgacggccccgtgctgctgcccgacaaccactacctgagcacccagtccgccctgagcaaagaccccaacgagaagcgcgatcacatggtcctgctggagttcgtgaccgccgccgggatcactctcggcatggacgagctgtacaagtaaagcggccgcgactctagatcataatcagccataccacacctccccctgaacctgaaaaatcaatgcaattattgttgaaataaagcacccagcaatgcctgggaccatgtaaaactgtcctggttctttccaaggtatagagcatagcccacaggctgatatttctggccagggttggttggaggacagccttgtctataggaagagaatgaggtttttgcactataagggcatgcaagtcagtcccgcccctaactccacctggttgcccatcccgcccctaactccgcccagttccgcccattctccgccccatggctgactaattttttttatttatgcagaggcggaggccgcctcggcctctgagctattccagaagtagtgaggaggcttttttggaggcccttaattaaattgacatatctacctaatttgtgtataataaccctgataaatgcttcaataatattgaaaaaggaagagtcctgtataaaaagaaccagctgtggaatgtgtgtcagttagtaggcttatgcaaagtagcccgcccaagagacaggctgaggcccgcccaccatgatagaacaagatggacttcatgctggatctcctgcagcatgggtggaaagactttttggttatgattgggctcagcagaccattggatgttctgatgctgctgtgttcaggcttagtgcacagggtaggccagtgctctttgtgaagaccgatctctctggagctttgaatgaactgcaggatgaggctgctaggctttcatggctggccaccacaggtgtcccttgtgctgcagtgttggatgtggttactgaggctgggagggattggctcctcctgggagaagtgccaggtcaggatctgttgagttctcacctggctccagctgaaaaagtctccataatggcagatgctatgagaaggctgcacacattggacccagctacatgcccatttgaccatcaggccaaacacaggattgagagggccagaacaagaatggaggctgggttggtggaccaggatgaccttgatgaggagcatcagggcctggctccagctgaattgtttgccaggctcaaggctagtatgcctgatggggaggatctggtggtaactcatggtgatgcctgtttgcctaacatcatggtggaaaatggaaggttctctggattcattgattgtggaagactgggtgtagctgacaggtatcaggacatagctcttgcaacaagggatattgcagaggagttgggtggagaatgggctgacaggttcctggtcttgtatggcattgctgccccagacagccaaagaattgctttctataggctgttggatgagtttttctaagctcagcacccacaaagctctcaggtcctaagagacactggcacccatatccatgcatcccttgtataaataaagcatccagcaaagctggtaccatgtaaaactgtcttggttgtttccaaggtatagagcatagctcaataggtttttgactttgtcttagatctgtagaaaagatcaaaggatcttcttgagatcctttttttctgcgcgtaatctgctgcttgcaaacaaaaaaaccaccgctaccagcggtggtttgtttgccggatcaagagctaccaactctttttccgaaggtaactggcttcagcagagcgcagataccaaatactgtccttctagtgtagccgtagttaggccaccacttcaagaactctgtagcaccgcctacatacctcgctctgctaatcctgttaccagtggctgctgccagtggcgataagtcgtgtcttaccgggttggactcaagacgatagttaccggataaggcgcagcggtcgggctgaacggggggttcgtgcacacagcccagcttggagcgaacgacctacaccgaactgagatacctacagcgtgagctatgagaaagcgccacgcttcccgaagggagaaaggcggacaggtatccggtaagcggcagggtcggaacaggagagcgcacgagggagcttccagggggaaacgcctggtatctttatagtcctgtcgggtttcgccacctctgacttgagcgtcgatttttgtgatgctcgtcaggggggcggagcctatggaaaaacgccagcaacgcggcctttttacggttcctattaatattgctagctttggatcc

SEQ ID NO: 5 - DNA, 4904 bp, Artificial Sequence
  Backbone Intermediate Vector 4
gcccctctccctcccccccccctaacgttactggccgaagccgcttggaataaggccggtgtgcgtttgtctatatgttattttccaccatattgccgtcttttggcaatgtgagggcccggaaacctggccctgtcttcttgacgagcattcctaggggtctttcccctctcgccaaaggaatgcaaggtctgttgaatgtcgtgaaggaagcagttcctctggaagcttcttgaagacaaacaacgtctgtagcgaccctttgcaggcagcggaaccccccacctggcgacaggtgcctctgcggccaaaagccacgtgtataagatacacctgcaaaggcggcacaaccccagtgccacgttgtgagttggatagttgtggaaagagtcaaatggctctcctcaagcgtattcaacaaggggctgaaggatgcccagaaggtaccccattgtatgggatctgatctggggcctcggtgcacatgctttacatgtgtttagtcgaggttaaaaaaacgtctaggccccccgaaccacggggacgtggttttcctttgaaaaacacgatgataatatggccacaaccatggtgagcaagggcgaggagctgttcaccggggtggtgcccatcctggtcgagctggacggcgacgtaaacggccacaagttcagcgtgtccggcgagggcgagggcgatgccacctacggcaagctgaccctgaagttcatctgcaccaccggcaagctgcccgtgccctggcccaccctcgtgaccaccctgacctacggcgtgcagtgcttcagccgctaccccgaccacatgaagcagcacgacttcttcaagtccgccatgcccgaaggctacgtccaggagcgcaccatcttcttcaaggacgacggcaactacaagacccgcgccgaggtgaagttcgagggcgacaccctggtgaaccgcatcgagctgaagggcatcgacttcaaggaggacggcaacatcctggggcacaagctggagtacaactacaacagccacaacgtctatatcatggccgacaagcagaagaacggcatcaaggtgaacttcaagatccgccacaacatcgaggacggcagcgtgcagctcgccgaccactaccagcagaacacccccatcggcgacggccccgtgctgctgcccgacaaccactacctgagcacccagtccgccctgagcaaagaccccaacgagaagcgcgatcacatggtcctgctggagttcgtgaccgccgccgggatcactctcggcatggacgagctgtacaagtaaagcggccgcgactctagatcataatcagccataccacacctccccctgaacctgaaaaatcaatgcaattattgttgaaataaagcacccagcaatgcctgggaccatgtaaaactgtcctggttctttccaaggtatagagcatagcccacaggctgatatttctggccagggttggttggaggacagccttgtctataggaagagaatgaggtttttgcactataagggcatgcaagtcagtcccgcccctaactccacctggttgcccatcccgcccctaactccgcccagttccgcccattctccgccccatggctgactaattttttttatttatgcagaggcggaggccgcctcggcctctgagctattccagaagtagtgaggaggcttttttggaggcccttaattaaattgacatatctacctaatttgtgtataataaccctgataaatgcttcaataatattgaaaaaggaagagtcctgtataaaaagaaccagctgtggaatgtgtgtcagttagtaggcttatgcaaagtagcccgcccaagagacaggctgaggcccgcccaccatgatagaacaagatggacttcatgctggatctcctgcagcatgggtggaaagactttttggttatgattgggctcagcagaccattggatgttctgatgctgctgtgttcaggcttagtgcacagggtaggccagtgctctttgtgaagaccgatctctctggagctttgaatgaactgcaggatgaggctgctaggctttcatggctggccaccacaggtgtcccttgtgctgcagtgttggatgtggttactgaggctgggagggattggctcctcctgggagaagtgccaggtcaggatctgttgagttctcacctggctccagctgaaaaagtctccataatggcagatgctatgagaaggctgcacacattggacccagctacatgcccatttgaccatcaggccaaacacaggattgagagggccagaacaagaatggaggctgggttggtggaccaggatgaccttgatgaggagcatcagggcctggctccagctgaattgtttgccaggctcaaggctagtatgcctgatggggaggatctggtggtaactcatggtgatgcctgtttgcctaacatcatggtggaaaatggaaggttctctggattcattgattgtggaagactgggtgtagctgacaggtatcaggacatagctcttgcaacaagggatattgcagaggagttgggtggagaatgggctgacaggttcctggtcttgtatggcattgctgccccagacagccaaagaattgctttctataggctgttggatgagtttttctaagctcagcacccacaaagctctcaggtcctaagagacactggcacccatatccatgcatcccttgtataaataaagcatccagcaaagctggtaccatgtaaaactgtcttggttgtttccaaggtatagagcatagctcaataggtttttgactttgtcccgcccctctcacagatactccaatgatcacttggcggtgttaggaatttggcgcgtaaaagtggccgggactttgtagtcagttccattcagggggcggagtagaccatggccagttacccctgtcatcagcatgcttctgcatttgatcaggctgcaaggtccagaggacactccaacagaaggacagctctcagacctagaaggcagcaggaagccacagaggtcagattggaacagaagatgcctaccctgctgagagtgtacattgatggacctcatgggatgggtaaaactacaactacacaactgctggttgccttgggcagtagggatgatattgtgtatgtgccagagcccatgacctattggcaggtgcttggggccagtgagactatagcaaatatctacacaactcagcacagacttgaccagggagagatttctgctggagatgcagctgtggttatgacttctgcccagatcaccatggggatgccctatgctgtgacagatgcagtcctggctccacatgtgggaggtgaagcaggcagctcccatgcacctccaccagccctgaccctgatttttgacaggcatcccattgctgcactgctttgctacccagcagctaggtacctgatgggcagcatgacaccacaggctgtgcttgcatttgtggcccttatccctccaacactgcctggcacaaacattgtgctgggggccctgccagaagataggcacatagacagactggccaaaaggcagagacctggagagagattggacctggctatgcttgcagctatcagaagggtctatggcctgctggccaatacagtaagatacttgcaggggggaggttcctggtgggaggactgggggcagctgtctggtacagcagttcctccacagggagcagaacctcagtctaatgctggacccagaccccatattggagacaccctcttcactctctttagagctcctgaactgcttgctcctaatggagatttgtacaatgtttttgcctgggctcttgatgtcctggctaagagactcaggccaatgcatgttttcattctggactatgaccaaagccctgcaggatgcagggatgccttgctccaactgacttctggcatggtacagactcatgttacaacaccaggctccattccaacaatatgtgatctggccagaacttttgctagggagatgggggaggcaaattgagcactgcatggacttacctgcctggtggtatcagtcacaggctctgataaggattcagctgttgtataaataaagcatgcagcctagcaggaaccatgttaatctctcttggttgtttccttggaatactcctaagcacattaggtttttagatctgtagaaaagatcaaaggatcttcttgagatcctttttttctgcgcgtaatctgctgcttgcaaacaaaaaaaccaccgctaccagcggtggtttgtttgccggatcaagagctaccaactctttttccgaaggtaactggcttcagcagagcgcagataccaaatactgtccttctagtgtagccgtagttaggccaccacttcaagaactctgtagcaccgcctacatacctcgctctgctaatcctgttaccagtggctgctgccagtggcgataagtcgtgtcttaccgggttggactcaagacgatagttaccggataaggcgcagcggtcgggctgaacggggggttcgtgcacacagcccagcttggagcgaacgacctacaccgaactgagatacctacagcgtgagctatgagaaagcgccacgcttcccgaagggagaaaggcggacaggtatccggtaagcggcagggtcggaacaggagagcgcacgagggagcttccagggggaaacgcctggtatctttatagtcctgtcgggtttcgccacctctgacttgagcgtcgatttttgtgatgctcgtcaggggggcggagcctatggaaaaacgccagcaacgcggcctttttacggttcctattaatattgctagctttggatcc

SEQ ID NO: 6 - DNA, 1536 bp, Vesicular stomatitis virus
  VSV-G protein, WT
  ref <308>: DATABASE ACCESSION NUMBER: GenBank: AJ318514.1
  ref <309>: DATABASE ENTRY DATE: 2002-01-23
atgaagtgccttttgtacttagcctttttattcattggggtgaattgcaagttcaccatagtttttccacacaaccaaaaaggaaactggaaaaatgttccttctaattaccattattgcccgtcaagctcagatttaaattggcataatgacttaataggcacagccttacaagtcaaaatgcccaagagtcacaaggctattcaagcagacggttggatgtgtcatgcttccaaatgggtcactacttgtgatttccgctggtatggaccgaagtatataacacattccatccgatccttcactccatctgtagaacaatgcaaggaaagcattgaacaaacgaaacaaggaacttggctgaatccaggcttccctcctcaaagttgtggatatgcaactgtgacggatgccgaagcagtgattgtccaggtgactcctcaccatgtgctggttgatgaatacacaggagaatgggttgattcacagttcatcaacggaaaatgcagcaattacatatgccccactgtccataactctacaacctggcattctgactataaggtcaaagggctatgtgattctaacctcatttccatggacatcaccttcttctcagaggacggagagctatcatccctgggaaaggagggcacagggttcagaagtaactactttgcttatgaaactggaggcaaggcctgcaaaatgcaatactgcaagcattggggagtcagactcccatcaggtgtctggttcgagatggctgataaggatctctttgctgcagccagattccctgaatgcccagaagggtcaagtatctctgctccatctcagacctcagtggatgtaagtctaattcaggacgttgagaggatcttggattattccctctgccaagaaacctggagcaaaatcagagcgggtcttccaatctctccagtggatctcagctatcttgctcctaaaaacccaggaaccggtcctgctttcaccataatcaatggtaccctaaaatactttgagaccagatacatcagagtcgatattgctgctccaatcctctcaagaatggtcggaatgatcagtggaactaccacagaaagggaactgtgggatgactgggcaccatatgaagacgtggaaattggacccaatggagttctgaggaccagttcaggatataagtttcctttatacatgattggacatggtatgttggactccgatcttcatcttagctcaaaggctcaggtgttcgaacatcctcacattcaagacgctgcttcgcaacttcctgatgatgagagtttattttttggtgatactgggctatccaaaaatccaatcgagcttgtagaaggttggttcagtagttggaaaagctctattgcctcttttttctttatcatagggttaatcattggactattcttggttctccgagttggtatccatctttgcattaaattaaagcacaccaagaaaagacagatttatacagacatagagatgaaccgacttggaaagtga

SEQ ID NO: 7 - DNA, 1536 bp, Artificial Sequence
  VSV-G WT (human optimized, CpG-free)
atgaaatgtctgctctacctggctttcctgtttataggggttaattgtaagtttactattgtcttccctcacaaccagaagggaaattggaagaatgtgcccagcaattaccactattgtcccagctcctctgatctcaattggcataatgacctgattggcacagccattcaggtgaaaatgcctaaaagtcacaaggctattcaagctgatggctggatgtgtcatgcctctaagtgggtgaccacctgtgatttcaggtggtatggacctaagtatattacacagtctatcagatcattcacaccctctgtggagcagtgtaaggaaagtattgagcagacaaaacaggggacttggctcaacccaggctttccacctcagagctgtggttatgctacagtgacagatgcagaggcagtgattgttcaggtcactcctcaccatgtgctggtggatgagtacactggtgaatgggttgacagccagttcattaatggcaagtgctccaattacatctgccctactgtgcataacagtacaacatggcacagtgattacaaagttaagggcctctgtgattccaacctcatcagcatggatatcaccttcttctctgaagatggagaactgtcaagtctgggtaaagagggaactgggttcaggagcaattactttgcatatgagacaggtggaaaagcctgtaagatgcagtattgcaaacactggggtgtcagactgccatcaggtgtgtggtttgaaatggcagacaaagacctctttgcagctgccaggtttcctgagtgtccagagggctcctccattagtgctccaagccaaacatctgttgatgtctcactgattcaggatgtggaaagaatcctggattacagtctgtgtcaggaaacctggagtaagattagagctggtctccctatctcacctgtggatctgagctatctggctccaaagaatcctgggacaggccctgcctttacaattatcaatggaactctcaagtactttgagactagatatatcagggttgacatagcagctccaatcctgtcaagaatggtggggatgatctcaggtaccacaacagaaagagaactgtgggatgactgggctccttatgaggatgtggagattggacctaatggggtgctgaggacctcctcaggctataagttcccactctatatgattggtcatggaatgctggactcagacctgcacctcagttccaaagcacaagtgtttgagcacccccacatccaggatgctgcatcccagctgcctgatgatgagagcctgttctttggagatacagggctgagtaagaaccctattgaactggtggagggatggttctcttcttggaaaagttctattgcctccttctttttcattataggcctgatcattggactctttctggtgctgagagttgggattcatctgtgtatcaagctgaaacacaccaaaaagagacagatctacacagatattgagatgaacaggctggggaagtaa

SEQ ID NO: 8 - DNA, 297 bp, Avian orthoreovirus
  Avian Reovirus p10 WT
  ref <308>: DATABASE ACCESSION NUMBER: GenBank: AY395797.1
  ref <309>: DATABASE ENTRY DATE: 2005-03-09
atgctgcgtatgcctcccggttcgtgtaacggtgcgactgctgtatttggtaacgttcattgtcaggcagctcaaaacacggcaggtggtgatttgcaagctacgtcatccataattgcatattggccttatctagcggcgggtggtggtttcttattaattgttatcattttcgctcttctatactgttgtaaggctaaggtcaaggcggacgctgcacgtagtgtcttccatcgtgagctggtagcgttgagttctggtaagcacaatgcaatggctccgccatacgacgtttga

SEQ ID NO: 9 - DNA, 297 bp, Artificial Sequence
  Avian Reovirus p10 WT (human codon optimized; CpG-free)
atgctcagaatgcctccaggaagttgtaatggtgctacagctgtgtttggaaatgttcactgtcaagcagctcagaatactgctggtggggatctgcaggccacttcatccatcattgcatactggccttacctggcagctggaggtggctttctcctgatagtcattatttttgccctgctgtactgttgcaaggccaaagtcaaagcagatgctgccagaagtgtcttccacagggagctggtggctctcagctctggcaagcacaatgctatggctcctccatatgatgtttaa

SEQ ID NO: 10 - DNA, 297 bp, Avian orthoreovirus
  Avian Reovirus p10 WT, S113 strain
  ref <308>: DATABASE ACCESSION NUMBER: GenBank: AF330703.1
  ref <309>: DATABASE ENTRY DATE: 2002-03-15
atgctgcgtatgcctcccggttcatgtaacggtgcgactgctgtatttggtaacgttcattgtcaggcagctcagaacacggcaggtggtgatttgcaagctacgtcatccataattgcatattggccttatctagcggcgggtggtggtttcttattaattgttatcattttcgctcttctatactgttgtaaggctaagatcaaggcggacgctgcacgtagtgtcttccatcgtgagctggtagcgttgagttctggtaagcacaatgcaatggctccgccatacgacgtttga

SEQ ID NO: 11 - DNA, 297 bp, Artificial Sequence
  Avian Reovirus p10 WT, S1133 strain (human codon optimized; CpG-free)
atgctcagaatgcctccaggaagttgtaatggtgctacagctgtgtttggaaatgttcactgtcaagcagctcagaatactgctggtggggatctgcaggccacttcatccatcattgcatactggccttacctggcagctggaggtggctttctcctgatagtcattatttttgccctgctgtactgttgcaaggccaaaatcaaagcagatgctgccagaagtgtcttccacagggagctggtggctctcagctctggcaagcacaatgctatggctcctccatatgatgtttaa

SEQ ID NO: 12 - DNA, 378 bp, Reptilian orthoreovirus
  Reptile Reovirus p14 WT
  ref <308>: DATABASE ACCESSION NUMBER: GenBank: AY238887.1
  ref <309>: DATABASE ENTRY DATE: 2004-06-22
atggggagtggaccctctaatttcgtcaatcacgcacctggagaagcaattgtaaccggtttggagaaaggggcagataaagtagctggaacgatatcacatacgatttgggaagtgatcgccggattagtagccttgctgacattcttagcgtttggcttctggttgttcaagtatctccaaaagagaagagaaagaaggagacaactcactgagttccaaaaacggtatctacggaatagctacaggttgagtgagatccagagacctatatcacagcacgaatacgaagacccatacgagccaccaagtcgtaggaaaccaccccctcctccttatagcacatacgtcaacatcgataatgtctcagccatttag

SEQ ID NO: 13 - DNA, 378 bp, Artificial Sequence
  Reptile Reovirus p14 WT (human codon optimized; CpG-free)
atgggatctgggccatctaattttgttaatcatgcacctggggaagccattgtgactgggctggagaagggagcagataaagttgctgggaccatcagccacactatttgggaggtcattgcaggcttggtggctcttttgaccttcctggcatttggcttctggctgttcaagtacctgcagaagaggagagaaagaaggagacagctcacagaattccagaagaggtatctgagaaattcctacagattgtcagaaattcaaaggccaatttctcagcatgagtatgaagacccctatgagcctccatccagaaggaaacctccccctccaccttactccacttatgtgaatattgacaatgtatctgccatataa

SEQ ID NO: 14 - DNA, 423 bp, Baboon orthoreovirus
  Baboon reovirus p15, WT
  ref <308>: DATABASE ACCESSION NUMBER: GenBank: AF406787.1
  ref <309>: DATABASE ENTRY DATE: 2001-09-10
atgggtcaaagacattcaatagttcaaccaccagctccaccgccaaatgcttttgttgaaattgtgagcagttctactggcattataatcgctgttggcatatttgcatttatattctcatttttatataagttgctgcagtggtacaatcgtaagtcaaagaataagaaacgtaaagagcaaattagagaacaaattgagcttggtttattatcatatggtgctggagtagcatcacttcctttgctcaacgttattgcacataatcctggatcagttatctcggctacccctatctataaaggtccgtgcactggtgtacctaattcgcgcctacttcaaatcacgagcgggactgcagaagagaacactagaattttgaatcatgatggaagaaacccagatggaagtatcaacgtttga

SEQ ID NO: 15 - DNA, 2004 bp, Gibbon ape leukemia virus
  GALV envelope protein WT
  ref <308>: DATABASE ACCESSION NUMBER: NCBI: NC_001885.2
  ref <309>: DATABASE ENTRY DATE: 2010-11-28
atggtattgctgcctgggtccatgcttctcacctcaaacctgcaccaccttcggcaccagatgagtcctgggagctggaaaagactgatcatcctcttaagctgcgtattcggcggcggcgggacgagtctgcaaaataagaacccccaccagcccatgaccctcacttggcaggtactgtcccaaactggagacgttgtctgggatacaaaggcagtccagcccccttggacttggtggcccacacttaaacctgatgtatgtgccttggcggctagtcttgagtcctgggatatcccgggaaccgatgtctcgtcctctaaacgagtcagacctccggactcagactatactgccgcttataagcaaatcacctggggagccatagggtgcagctaccctcgggctaggactagaatggcaagctctaccttctacgtatgtccccgggatggccggaccctttcagaagctagaaggtgcggggggctagaatccctatactgtaaagaatgggattgtgagaccacggggaccggttattggctatctaaatcctcaaaagacctcataactgtaaaatgggaccaaaatagcgaatggactcaaaaatttcaacagtgtcaccagaccggctggtgtaacccccttaaaatagatttcacagacaaaggaaaattatccaaggactggataacgggaaaaacctggggattaagattctatgtgtctggacatccaggcgtacagttcaccattcgcttaaaaatcaccaacatgccagctgtggcagtaggtcctgacctcgtccttgtggaacaaggacctcctagaacgtccctcgctctcccacctcctcttcccccaagggaagcgccaccgccatctctccccgactctaactccacagccctggcgactagtgcacaaactcccacggtgagaaaaacaattgttaccctaaacactccgcctcccaccacaggcgacagactttttgatcttgtgcagggggccttcctaaccttaaatgctaccaacccaggggccactgagtcttgctggctttgtttggccatgggccccccttattatgaagcaatagcctcatcaggagaggtcgcctactccaccgaccttgaccggtgccgctgggggacccaaggaaagctcaccctcactgaggtctcaggacacgggttgtgcataggaaaggtgccctttacccatcagcatctctgcaatcagaccctatccatcaattcctccggagaccatcagtatctgctcccctccaaccatagctggtgggcttgcagcactggcctcaccccttgcctctccacctcagtttttaatcagactagagatttctgtatccaggtccagctgattcctcgcatctattactatcctgaagaagttttgttacaggcctatgacaattctcaccccaggactaaaagagaggctgtctcacttaccctagctgttttactggggttgggaatcacggcgggaataggtactggttcaactgccttaattaaaggacctatagacctccagcaaggcctgacaagcctccagatcgccatagatgctgacctccgggccctccaagactcagtcagcaagttagaggactcactgacttccctgtccgaggtagtgctccaaaataggagaggccttgacttgctgtttctaaaagaaggtggcctctgtgcggccctaaaggaagagtgctgtttttacatagaccactcaggtgcagtacgggactccatgaaaaaactcaaagaaaaactggataaaagacagttagagcgccagaaaagccaaaactggtatgaaggatggttcaataactccccttggttcactaccctgctatcaaccatcgctgggcccctattactcctccttctgttgctcatcctcgggccatgcatcatcaataagttagttcaattcatcaatgataggataagtgcatgttaa

SEQ ID NO: 16 - DNA, 2004 bp, Artificial Sequence
  Gibbon ape leukemia virus (GALV) envelope protein WT (human codon optimized, CpG-free)
atggtcctgctgccaggctcaatgctgctgaccagcaatctccaccacctgagacaccagatgtcacctgggtcctggaagagacttatcattcttctgtcctgtgtgtttgggggtggaggcaccagcctgcaaaataagaacccacatcagcccatgaccctcacctggcaggtcctgagccagacaggtgatgttgtctgggataccaaagcagtccagcccccctggacttggtggcccaccttgaaacctgatgtctgtgccctggcagctagtctggagagctgggacatcccaggcactgatgtcagcagcagcaagagggttaggccacctgacagtgactacactgcagcctacaagcagatcacctggggagccattggctgctcctaccctagagctagaaccagaatggcctccagtaccttctatgtctgccctagagatggcagaactctgtctgaggccaggagatgtggtggactggaatccctctactgcaaagagtgggactgtgagactactggcacaggctattggttgtccaagtcatccaaggacttgatcactgtgaagtgggatcagaattcagagtggacccagaaatttcagcaatgccaccagacaggctggtgcaaccccttgaagattgactttacagataaggggaagctcagtaaagactggatcacaggcaaaacctggggactgaggttctatgtttctggccatccaggtgttcagttcaccatcagattgaaaatcaccaatatgccagctgtggcagtgggtcctgaccttgtgctggtggaacagggcccacccaggacatccttggccttgcctccacccctccctcccagggaagccccccctccaagcttgcctgactccaattctacagctctggctactagtgcccaaactcctactgtgaggaagaccattgtcacactcaatacaccccctccaactacaggagacaggttgtttgaccttgtgcaaggtgccttccttacacttaatgccaccaaccctggagccacagaaagttgttggctgtgcctggcaatgggtccaccctactatgaggcaattgcaagttctggtgaagtggcatatagcactgacctggatagatgtaggtgggggacccagggaaaactcacacttactgaagtgagtgggcatggcctgtgcattggaaaagtcccattcacacaccaacatctgtgcaaccaaacactctccatcaactcttctggtgaccaccagtacctgcttccaagcaaccacagctggtgggcctgcagcactgggctgaccccctgcctgagcacctctgtgttcaatcagacaagagatttctgtatccaggtgcagctcattcccagaatctactactatcctgaggaggtgctgctgcaagcctatgacaacagtcatcccaggactaagagggaagcagtgagtctcaccctggctgttctgctgggcctgggaatcacagctgggattggtacaggctcaacagcccttatcaagggccccattgacctgcagcaaggactgacttcccttcagattgcaattgatgctgatctgagagccctgcaggattctgtgtccaaactggaggacagccttacctctctctcagaagtggttcttcagaacaggagaggactggacttgctctttctcaaagagggagggctttgtgctgccctcaaggaggagtgttgcttttacattgatcattctggggctgttagagattcaatgaaaaagctcaaggagaaattggataaaaggcagctggaaagacagaagtctcaaaactggtatgaagggtggttcaacaatagtccttggttcactaccttgctgagcactattgctggcccactcttgctgctgttgctcctgctcatcctggggccctgtatcatcaacaagctggtgcagtttatcaatgacaggatcagtgcctgctga

SEQ ID NO: 17 - DNA, 1590 bp, Simian virus 5
  Simian virus 5 F protein (WT)
atgggtactataattcaatttctggtggtctcctgtctattggcaggagcaggcagccttgatccagcagccctcatgcaaatcggtgtcattccaacaaatgtccggcaacttatgtattatactgaggcctcatcagcattcattgttgtgaagttaatgcctacaattgactcgccgattagtggatgtaatataacatcaatttcaagctataatgcaacagtgacaaaactcctacagccgatcggtgagaatttggagacgattaggaaccagttgattccaactcggaggagacgccggtttgcaggggtggtgattggattagctgcattaggagtagctactgccgcacaggtcactgccgcagtggcactagtaaaggcaaatgaaaatgctgcggctatactcaatctcaaaaatgcaatccaaaaaacaaatgcagcagttgcagatgtggtccaggccacacaatcactaggaacggcagttcaagcagttcaagatcacataaacagtgtggtaagtccagcaattacagcagccaattgtaaggcccaagatgctatcattggctcaatcctcaatctctatttgaccgagttgacaaccatcttccacaatcaaattacaaaccctgcattgagtcccattacaattcaagctttaaggatcctactggggagtaccttgccgactgtggtcgaaaaatctttcaatacccagataagtgcagctgagcttctctcatcagggttattgacaggccagattgtgggattagatttgacctatatgcagatggtcataaaaattgagctgccaactttaactgtacaacctgcaacccagatcatagatctggccaccatttctgcattcattaacaatcaagaagtcatggcccaattaccaacacgtgttatggtgactggcagcttgatccaagcctatcccgcatcgcaatgcaccattacacccaacactgtgtactgtaggtataatgatgcccaagtactctcagatgatactatggcttgcctccaaggtaacttgacaagatgcaccttctctccagtggttgggagctttctcactcgattcgtgctgttcgatggaatagtttatgcaaattgcaggtcgatgttgtgcaagtgcatgcaacctgctgctgtgatcctacagccgagttcatcccctgtaactgtcattgacatgtacaaatgtgtgagtctgcagcttgacaatctcagattcaccatcactcaattggccaatgtaacctacaatagcaccatcaagcttgaatcatcccagatcttgtctattgatccgttggatatatcccaaaatctagctgcggtgaataagagtctaagtgatgcactacaacacttagcacaaagtgacacatatctttctgcaatcacatcagctacgactacaagtgtattatccataatagcaatctgtcttggatcgttaggtttaatattaataatcttgctcagtgtagttgtgtggaagttattgaccattgtcgttgctaatcgaaatagaatggagaattttgtttatcataaataa

SEQ ID NO: 18 - DNA, 1590 bp, Artificial Sequence
  Simian virus 5 F protein WT (human codon optimized, CpG-free)
  ref <308>: DATABASE ACCESSION NUMBER: GenBank: K02253.1
  ref <309>: DATABASE ENTRY DATE: 1993-08-03
atggggactattattcaatttctggtggtcagctgtctgctggctggggcaggatctctggaccctgctgccctcatgcagattggggtgattcctaccaatgtcaggcagctcatgtattatacagaagcttcttctgcctttattgttgtgaagctgatgcctactatagacagtcccatctctggctgtaacattacttcaataagttcctataatgcaactgtgactaagctgctccagcccataggggaaaatctggaaactataagaaaccagctgattcctacaagaaggagaaggagatttgctggagttgtgattgggctggctgccctgggtgtggctacagcagcacaagtgacagctgcagtggccctggtcaaagcaaatgagaatgcagctgccatcctgaatctcaagaatgccatccagaagactaatgctgcagttgctgatgtggtgcaagccacacaatctctgggcacagcagtgcaagcagtgcaggatcatatcaactctgttgtgagcccagcaattacagctgccaactgtaaagcacaagatgccatcattggtagcatactcaatctgtatctgactgagctgaccacaatctttcacaaccagattaccaacccagccctgtctccaattaccatccaggccctcaggatactgctgggctctacactgcccactgtggttgaaaagagctttaatacccagatcagtgcagctgagctgctgtcttctggactcctgacagggcagattgttgggctggacctcacctacatgcagatggttatcaagattgaactgcctacactgactgttcagcctgccactcagattattgatctggcaacaatttcagcctttatcaataaccaggaagtgatggctcagctcccaacaagggttatggtgactggcagtctgatacaggcataccctgccagccagtgcaccataacacccaatacagtgtattgcaggtacaatgatgcccaggtgctgtctgatgacacaatggcctgcctgcaggggaatctgactaggtgcacttttagtccagtggtgggcagctttctgactaggtttgtgctgtttgatggcatagtctatgccaactgcaggtccatgctctgcaaatgcatgcagcctgcagcagttattctgcagccaagtagcagtccagtgacagtgatagacatgtataagtgtgtttctctgcaactggacaacctgaggttcaccatcactcagctggcaaatgttacttacaactcaactattaaactggagtcaagtcagattctgagcattgaccctctggatatctcccagaatctggctgcagtgaataagagcctcagtgatgcactccaacatctggcccagtcagacacctatctctcagccattacctctgcaactaccacctcagtcctgagcattatagctatatgtctgggatcactgggcctgattctgatcatactgctgagtgttgtggtgtggaagctgctgacaattgtggtggccaacaggaataggatggaaaattttgtgtaccacaaatag

SEQ ID NO: 19 - DNA, 1590 bp, Artificial Sequence
  Simian virus 5 F protein, G105A mutant (human codon optimized, CpG-free)
atggggactattattcaatttctggtggtcagctgtctgctggctggggcaggatctctggaccctgctgccctcatgcagattggggtgattcctaccaatgtcaggcagctcatgtattatacagaagcttcttctgcctttattgttgtgaagctgatgcctactatagacagtcccatctctggctgtaacattacttcaataagttcctataatgcaactgtgactaagctgctccagcccataggggaaaatctggaaactataagaaaccagctgattcctacaagaaggagaaggagatttgctgcagttgtgattgggctggctgccctgggtgtggctacagcagcacaagtgacagctgcagtggccctggtcaaagcaaatgagaatgcagctgccatcctgaatctcaagaatgccatccagaagactaatgctgcagttgctgatgtggtgcaagccacacaatctctgggcacagcagtgcaagcagtgcaggatcatatcaactctgttgtgagcccagcaattacagctgccaactgtaaagcacaagatgccatcattggtagcatactcaatctgtatctgactgagctgaccacaatctttcacaaccagattaccaacccagccctgtctccaattaccatccaggccctcaggatactgctgggctctacactgcccactgtggttgaaaagagctttaatacccagatcagtgcagctgagctgctgtcttctggactcctgacagggcagattgttgggctggacctcacctacatgcagatggttatcaagattgaactgcctacactgactgttcagcctgccactcagattattgatctggcaacaatttcagcctttatcaataaccaggaagtgatggctcagctcccaacaagggttatggtgactggcagtctgatacaggcataccctgccagccagtgcaccataacacccaatacagtgtattgcaggtacaatgatgcccaggtgctgtctgatgacacaatggcctgcctgcaggggaatctgactaggtgcacttttagtccagtggtgggcagctttctgactaggtttgtgctgtttgatggcatagtctatgccaactgcaggtccatgctctgcaaatgcatgcagcctgcagcagttattctgcagccaagtagcagtccagtgacagtgatagacatgtataagtgtgtttctctgcaactggacaacctgaggttcaccatcactcagctggcaaatgttacttacaactcaactattaaactggagtcaagtcagattctgagcattgaccctctggatatctcccagaatctggctgcagtgaataagagcctcagtgatgcactccaacatctggcccagtcagacacctatctctcagccattacctctgcaactaccacctcagtcctgagcattatagctatatgtctgggatcactgggcctgattctgatcatactgctgagtgttgtggtgtggaagctgctgacaattgtggtggccaacaggaataggatggaaaattttgtgtaccacaaatag

SEQ ID NO: 20 - DNA, 1590 bp, Artificial Sequence
  Simian virus 5 F protein, G109A mutant (human codon optimized, CpG-free)
atggggactattattcaatttctggtggtcagctgtctgctggctggggcaggatctctggaccctgctgccctcatgcagattggggtgattcctaccaatgtcaggcagctcatgtattatacagaagcttcttctgcctttattgttgtgaagctgatgcctactatagacagtcccatctctggctgtaacattacttcaataagttcctataatgcaactgtgactaagctgctccagcccataggggaaaatctggaaactataagaaaccagctgattcctacaagaaggagaaggagatttgctggagttgtgattgccctggctgccctgggtgtggctacagcagcacaagtgacagctgcagtggccctggtcaaagcaaatgagaatgcagctgccatcctgaatctcaagaatgccatccagaagactaatgctgcagttgctgatgtggtgcaagccacacaatctctgggcacagcagtgcaagcagtgcaggatcatatcaactctgttgtgagcccagcaattacagctgccaactgtaaagcacaagatgccatcattggtagcatactcaatctgtatctgactgagctgaccacaatctttcacaaccagattaccaacccagccctgtctccaattaccatccaggccctcaggatactgctgggctctacactgcccactgtggttgaaaagagctttaatacccagatcagtgcagctgagctgctgtcttctggactcctgacagggcagattgttgggctggacctcacctacatgcagatggttatcaagattgaactgcctacactgactgttcagcctgccactcagattattgatctggcaacaatttcagcctttatcaataaccaggaagtgatggctcagctcccaacaagggttatggtgactggcagtctgatacaggcataccctgccagccagtgcaccataacacccaatacagtgtattgcaggtacaatgatgcccaggtgctgtctgatgacacaatggcctgcctgcaggggaatctgactaggtgcacttttagtccagtggtgggcagctttctgactaggtttgtgctgtttgatggcatagtctatgccaactgcaggtccatgctctgcaaatgcatgcagcctgcagcagttattctgcagccaagtagcagtccagtgacagtgatagacatgtataagtgtgtttctctgcaactggacaacctgaggttcaccatcactcagctggcaaatgttacttacaactcaactattaaactggagtcaagtcagattctgagcattgaccctctggatatctcccagaatctggctgcagtgaataagagcctcagtgatgcactccaacatctggcccagtcagacacctatctctcagccattacctctgcaactaccacctcagtcctgagcattatagctatatgtctgggatcactgggcctgattctgatcatactgctgagtgttgtggtgtggaagctgctgacaattgtggtggccaacaggaataggatggaaaattttgtgtaccacaaatag

SEQ ID NO: 21 - DNA, 1590 bp, Artificial Sequence
  Simian virus 5 F protein, G114A mutant (human codon optimized, CpG-free)
atggggactattattcaatttctggtggtcagctgtctgctggctggggcaggatctctggaccctgctgccctcatgcagattggggtgattcctaccaatgtcaggcagctcatgtattatacagaagcttcttctgcctttattgttgtgaagctgatgcctactatagacagtcccatctctggctgtaacattacttcaataagttcctataatgcaactgtgactaagctgctccagcccataggggaaaatctggaaactataagaaaccagctgattcctacaagaaggagaaggagatttgctggagttgtgattgggctggctgccctggctgtggctacagcagcacaagtgacagctgcagtggccctggtcaaagcaaatgagaatgcagctgccatcctgaatctcaagaatgccatccagaagactaatgctgcagttgctgatgtggtgcaagccacacaatctctgggcacagcagtgcaagcagtgcaggatcatatcaactctgttgtgagcccagcaattacagctgccaactgtaaagcacaagatgccatcattggtagcatactcaatctgtatctgactgagctgaccacaatctttcacaaccagattaccaacccagccctgtctccaattaccatccaggccctcaggatactgctgggctctacactgcccactgtggttgaaaagagctttaatacccagatcagtgcagctgagctgctgtcttctggactcctgacagggcagattgttgggctggacctcacctacatgcagatggttatcaagattgaactgcctacactgactgttcagcctgccactcagattattgatctggcaacaatttcagcctttatcaataaccaggaagtgatggctcagctcccaacaagggttatggtgactggcagtctgatacaggcataccctgccagccagtgcaccataacacccaatacagtgtattgcaggtacaatgatgcccaggtgctgtctgatgacacaatggcctgcctgcaggggaatctgactaggtgcacttttagtccagtggtgggcagctttctgactaggtttgtgctgtttgatggcatagtctatgccaactgcaggtccatgctctgcaaatgcatgcagcctgcagcagttattctgcagccaagtagcagtccagtgacagtgatagacatgtataagtgtgtttctctgcaactggacaacctgaggttcaccatcactcagctggcaaatgttacttacaactcaactattaaactggagtcaagtcagattctgagcattgaccctctggatatctcccagaatctggctgcagtgaataagagcctcagtgatgcactccaacatctggcccagtcagacacctatctctcagccattacctctgcaactaccacctcagtcctgagcattatagctatatgtctgggatcactgggcctgattctgatcatactgctgagtgttgtggtgtggaagctgctgacaattgtggtggccaacaggaataggatggaaaattttgtgtaccacaaatag

SEQ ID NO: 22 - DNA, 1590 bp, Artificial Sequence
  Simian virus 5 F protein, G105A/G109A mutant (human codon optimized, CpG-free)
atggggactattattcaatttctggtggtcagctgtctgctggctggggcaggatctctggaccctgctgccctcatgcagattggggtgattcctaccaatgtcaggcagctcatgtattatacagaagcttcttctgcctttattgttgtgaagctgatgcctactatagacagtcccatctctggctgtaacattacttcaataagttcctataatgcaactgtgactaagctgctccagcccataggggaaaatctggaaactataagaaaccagctgattcctacaagaaggagaaggagatttgctgcagttgtgattgccctggctgccctgggtgtggctacagcagcacaagtgacagctgcagtggccctggtcaaagcaaatgagaatgcagctgccatcctgaatctcaagaatgccatccagaagactaatgctgcagttgctgatgtggtgcaagccacacaatctctgggcacagcagtgcaagcagtgcaggatcatatcaactctgttgtgagcccagcaattacagctgccaactgtaaagcacaagatgccatcattggtagcatactcaatctgtatctgactgagctgaccacaatctttcacaaccagattaccaacccagccctgtctccaattaccatccaggccctcaggatactgctgggctctacactgcccactgtggttgaaaagagctttaatacccagatcagtgcagctgagctgctgtcttctggactcctgacagggcagattgttgggctggacctcacctacatgcagatggttatcaagattgaactgcctacactgactgttcagcctgccactcagattattgatctggcaacaatttcagcctttatcaataaccaggaagtgatggctcagctcccaacaagggttatggtgactggcagtctgatacaggcataccctgccagccagtgcaccataacacccaatacagtgtattgcaggtacaatgatgcccaggtgctgtctgatgacacaatggcctgcctgcaggggaatctgactaggtgcacttttagtccagtggtgggcagctttctgactaggtttgtgctgtttgatggcatagtctatgccaactgcaggtccatgctctgcaaatgcatgcagcctgcagcagttattctgcagccaagtagcagtccagtgacagtgatagacatgtataagtgtgtttctctgcaactggacaacctgaggttcaccatcactcagctggcaaatgttacttacaactcaactattaaactggagtcaagtcagattctgagcattgaccctctggatatctcccagaatctggctgcagtgaataagagcctcagtgatgcactccaacatctggcccagtcagacacctatctctcagccattacctctgcaactaccacctcagtcctgagcattatagctatatgtctgggatcactgggcctgattctgatcatactgctgagtgttgtggtgtggaagctgctgacaattgtggtggccaacaggaataggatggaaaattttgtgtaccacaaatag

SEQ ID NO: 23 - DNA, 1590 bp, Artificial Sequence
  Simian virus 5 F protein, G105A/G114A mutant (human codon optimized, CpG-free)
atggggactattattcaatttctggtggtcagctgtctgctggctggggcaggatctctggaccctgctgccctcatgcagattggggtgattcctaccaatgtcaggcagctcatgtattatacagaagcttcttctgcctttattgttgtgaagctgatgcctactatagacagtcccatctctggctgtaacattacttcaataagttcctataatgcaactgtgactaagctgctccagcccataggggaaaatctggaaactataagaaaccagctgattcctacaagaaggagaaggagatttgctgcagttgtgattgggctggctgccctggctgtggctacagcagcacaagtgacagctgcagtggccctggtcaaagcaaatgagaatgcagctgccatcctgaatctcaagaatgccatccagaagactaatgctgcagttgctgatgtggtgcaagccacacaatctctgggcacagcagtgcaagcagtgcaggatcatatcaactctgttgtgagcccagcaattacagctgccaactgtaaagcacaagatgccatcattggtagcatactcaatctgtatctgactgagctgaccacaatctttcacaaccagattaccaacccagccctgtctccaattaccatccaggccctcaggatactgctgggctctacactgcccactgtggttgaaaagagctttaatacccagatcagtgcagctgagctgctgtcttctggactcctgacagggcagattgttgggctggacctcacctacatgcagatggttatcaagattgaactgcctacactgactgttcagcctgccactcagattattgatctggcaacaatttcagcctttatcaataaccaggaagtgatggctcagctcccaacaagggttatggtgactggcagtctgatacaggcataccctgccagccagtgcaccataacacccaatacagtgtattgcaggtacaatgatgcccaggtgctgtctgatgacacaatggcctgcctgcaggggaatctgactaggtgcacttttagtccagtggtgggcagctttctgactaggtttgtgctgtttgatggcatagtctatgccaactgcaggtccatgctctgcaaatgcatgcagcctgcagcagttattctgcagccaagtagcagtccagtgacagtgatagacatgtataagtgtgtttctctgcaactggacaacctgaggttcaccatcactcagctggcaaatgttacttacaactcaactattaaactggagtcaagtcagattctgagcattgaccctctggatatctcccagaatctggctgcagtgaataagagcctcagtgatgcactccaacatctggcccagtcagacacctatctctcagccattacctctgcaactaccacctcagtcctgagcattatagctatatgtctgggatcactgggcctgattctgatcatactgctgagtgttgtggtgtggaagctgctgacaattgtggtggccaacaggaataggatggaaaattttgtgtaccacaaatag

SEQ ID NO: 24 - DNA, 1590 bp, Artificial Sequence
  Simian virus 5 F protein, G109A/G114A mutant (human codon optimized, CpG-free)
atggggactattattcaatttctggtggtcagctgtctgctggctggggcaggatctctggaccctgctgccctcatgcagattggggtgattcctaccaatgtcaggcagctcatgtattatacagaagcttcttctgcctttattgttgtgaagctgatgcctactatagacagtcccatctctggctgtaacattacttcaataagttcctataatgcaactgtgactaagctgctccagcccataggggaaaatctggaaactataagaaaccagctgattcctacaagaaggagaaggagatttgctggagttgtgattgccctggctgccctggctgtggctacagcagcacaagtgacagctgcagtggccctggtcaaagcaaatgagaatgcagctgccatcctgaatctcaagaatgccatccagaagactaatgctgcagttgctgatgtggtgcaagccacacaatctctgggcacagcagtgcaagcagtgcaggatcatatcaactctgttgtgagcccagcaattacagctgccaactgtaaagcacaagatgccatcattggtagcatactcaatctgtatctgactgagctgaccacaatctttcacaaccagattaccaacccagccctgtctccaattaccatccaggccctcaggatactgctgggctctacactgcccactgtggttgaaaagagctttaatacccagatcagtgcagctgagctgctgtcttctggactcctgacagggcagattgttgggctggacctcacctacatgcagatggttatcaagattgaactgcctacactgactgttcagcctgccactcagattattgatctggcaacaatttcagcctttatcaataaccaggaagtgatggctcagctcccaacaagggttatggtgactggcagtctgatacaggcataccctgccagccagtgcaccataacacccaatacagtgtattgcaggtacaatgatgcccaggtgctgtctgatgacacaatggcctgcctgcaggggaatctgactaggtgcacttttagtccagtggtgggcagctttctgactaggtttgtgctgtttgatggcatagtctatgccaactgcaggtccatgctctgcaaatgcatgcagcctgcagcagttattctgcagccaagtagcagtccagtgacagtgatagacatgtataagtgtgtttctctgcaactggacaacctgaggttcaccatcactcagctggcaaatgttacttacaactcaactattaaactggagtcaagtcagattctgagcattgaccctctggatatctcccagaatctggctgcagtgaataagagcctcagtgatgcactccaacatctggcccagtcagacacctatctctcagccattacctctgcaactaccacctcagtcctgagcattatagctatatgtctgggatcactgggcctgattctgatcatactgctgagtgttgtggtgtggaagctgctgacaattgtggtggccaacaggaataggatggaaaattttgtgtaccacaaatag

SEQ ID NO: 25 - DNA, 1590 bp, Artificial Sequence
  Simian virus 5 F protein, G105A/G109A/G114A mutant (human codon optimized, CpG-free)
atggggactattattcaatttctggtggtcagctgtctgctggctggggcaggatctctggaccctgctgccctcatgcagattggggtgattcctaccaatgtcaggcagctcatgtattatacagaagcttcttctgcctttattgttgtgaagctgatgcctactatagacagtcccatctctggctgtaacattacttcaataagttcctataatgcaactgtgactaagctgctccagcccataggggaaaatctggaaactataagaaaccagctgattcctacaagaaggagaaggagatttgctgcagttgtgattgccctggctgccctggctgtggctacagcagcacaagtgacagctgcagtggccctggtcaaagcaaatgagaatgcagctgccatcctgaatctcaagaatgccatccagaagactaatgctgcagttgctgatgtggtgcaagccacacaatctctgggcacagcagtgcaagcagtgcaggatcatatcaactctgttgtgagcccagcaattacagctgccaactgtaaagcacaagatgccatcattggtagcatactcaatctgtatctgactgagctgaccacaatctttcacaaccagattaccaacccagccctgtctccaattaccatccaggccctcaggatactgctgggctctacactgcccactgtggttgaaaagagctttaatacccagatcagtgcagctgagctgctgtcttctggactcctgacagggcagattgttgggctggacctcacctacatgcagatggttatcaagattgaactgcctacactgactgttcagcctgccactcagattattgatctggcaacaatttcagcctttatcaataaccaggaagtgatggctcagctcccaacaagggttatggtgactggcagtctgatacaggcataccctgccagccagtgcaccataacacccaatacagtgtattgcaggtacaatgatgcccaggtgctgtctgatgacacaatggcctgcctgcaggggaatctgactaggtgcacttttagtccagtggtgggcagctttctgactaggtttgtgctgtttgatggcatagtctatgccaactgcaggtccatgctctgcaaatgcatgcagcctgcagcagttattctgcagccaagtagcagtccagtgacagtgatagacatgtataagtgtgtttctctgcaactggacaacctgaggttcaccatcactcagctggcaaatgttacttacaactcaactattaaactggagtcaagtcagattctgagcattgaccctctggatatctcccagaatctggctgcagtgaataagagcctcagtgatgcactccaacatctggcccagtcagacacctatctctcagccattacctctgcaactaccacctcagtcctgagcattatagctatatgtctgggatcactgggcctgattctgatcatactgctgagtgttgtggtgtggaagctgctgacaattgtggtggccaacaggaataggatggaaaattttgtgtaccacaaatag

SEQ ID NO: 26 - DNA, 1710 bp, Gallus gallus
  Chicken endogenous retrovirus envelope protein, WT
  ref <308>: DATABASE ACCESSION NUMBER: GenBank: AY157601.1
  ref <309>: DATABASE ENTRY DATE: 2004-01-06
atggaccaagtcattaaggaaatgttcctgggcagaccgaaaacggactcgggagaaaaaccccagcagcccgcaggcggcaagaaaaggaagcagaaggacactcatccattgctgccatcgagaggttacttcttctttcaaatgatacttgtgtgcgtggttattatttccgttgtcccaggggtggggggagttcatctgttgcaacaaccaggaaacgtgtgggtcacctgggcaaataagacgggccgaacagatttttgccttagtctacagtcagcgacctcaccattccgcacctgcttgataggcattccacagtatcctctgaacaccttcaagggatacgtcactaatgttactgcttgcgataacgacgccgatttagccagccaaacagcatgcttgataaaggctctaaatacaaccctcccttgggacccccaagaattggatattttagggtcccagatgatcaagaacggaacaacacgtacgtgtgttacctttggttcggtgtgctataaagagaacaatcgcagtagagtctgtcacaattttgatgggaattttaatgggactggtggggcagaagcagaattgcgtgacttcatagcaaaatggaaaagtgatgaccttcttataaggccctatgtcaaccaatcatggacgatggtaagtccaataaacgtagagagtttttcaataagtcgtagatattgtggattcaccagtaacgagactcgttactatagaggggacctttctaattggtgtggttcaaaaaggggaaaatggtcagcggggtacagcaacaggacaaaatgttccagcaacacgacgggttgcggtggtaattgcacgacggaatggaattattatgcatatgggtttaccttcgggaaacagccagaggtgttgtggaacaatgggactgctaaggcactccccccaggtattttcttgatttgtggggacagggcttggcaaggcatcccgcgtaatgccttgggagggccctgttatctaggacaattgactatgctctctcctaactttaccacctggataacatatgggccgaacattacgggtcaccgccgtagcaggcgctcgctgagtcgtctctcgcctgactgcggtgatgagctacagctatggagtgtgacagcccggatatttgcttctttctttgctcctggtatagcagcagcacaggccttaaaggagatcgaacgattggcatgttggtcggttaagcaagcgaatttaacatcattaatattgaatgcgatgctggaggatacgagcagcatccggcacgcagtgttgcagaatcgagcagccatcgatttcttactcctggcgcagggacacgggtgtcaagacgtggaagggatgtgttgcttcaatctcagcgatcatagtgagtccattcacaaggcgctccaagccatgaaggaacatacagagaagatacgggtggaagatgatcccataggggactggtttacgcgcacgtttggtgatctaggaaggtggctcgcgaaaggtgttaagacgctactgtttgccttgcttgtcatagcctgtctattagctatcattccatgtttaatcaagtgctttcaggattgtctattgagaacaatgaatcagtttatggatgaacgcataaaatatcatagaattagggagcagctgtag

SEQ ID NO: 27 - DNA, 1656 bp, Porcine parainfluenza virus
  SER F protein, WT
  ref <308>: DATABASE ACCESSION NUMBER: GenBank: AJ278916.1
  ref <309>: DATABASE ENTRY DATE: 2005-04-15
atgggtactataattcaatttctggtggtctcctgtctattggcaggagcaggcagccttgatccagcagccctcatgcaaatcggtgtcattccaacaaatgtccggcaacttatgtattatactgaggcctcatcagcattcattgttgtgaagttaatgcctacaattgactcgccgattagtggatgtaatataacatcaatttcaagctataatgcaacagtgacaaaactcctacagccgatcggtgagaatttggaaacgattaggaaccagttgattccaactcggaggagacgccggtttgcaggggtggtgattggattagctgcattaggagtagctactgccgcacaggtcactgccgcagtagcactagtaaaggcaaataaaaatgctgcggctatactcaatctcaaaaatgcaatccaaaaaacaaatacagcagttgcagatgtggtccaggccacacaatcactaggaacggcagttcaagcagttcaagatcacataaacagtgtggtaagtccagcaattacagcagccaattgtaaggcccaagatgctatcattggctcaatcctcaatctctatttgaccgagttgacaactatcttccacaatcaaattacaaaccctgcattgagtcctattacaattcaagctttaagaatcctactggggagtaccttgccgactgtggtcgaaaaatctttcaatacccagataagtgcagctgagcttctctcatcagggttattgacaggccagattgtgggattagatttgacctatatgcagatggtcataaaaattgagctgccaactttaactgtacaacctgcaacccagatcattgatctggccaccatttctgcattcattaacaatcaagaagtcatggcccaattaccaacacgtgttattgtgactggcagcttgatccaagcctatcccgcatcgcaatgcactattacacccaacactgtgtactgtaggtataatgatgcccaagtactctcagatgatacgatggcttgcctccaaggtaacttgacaagatgcaccttctctccggtggttgggagctttctcactcgattcatgctgttcgatggaatagtttatgcaaattgcaggtcgatgttatgcaagtgcatgcagcctgctgctgtgatcctacagccgagttcatcccctgtaactgtcattgacatgtacaaatgtgtgagtctgcagcttgacaatctcagattcaccatcactcaattggccaatgtaacctacaatagcaccatcaagcttgaaacatcccaaatcttgcctattgatccgttggatatatcccagaatctagctgcggtgaataagagtctaagtgatgcactacaacacttagcacaaagtgacacatacctttctgcaatcacatcagctacgactacaagtgtattatccataatggcaatctgtcttggatcgttaggtttaatcttaataatcttgctcagtgtagttgtgtggaagttattgaccattgtcactgctaatcgaaatagaatggagaattttgtttatcataattcagcattccaccactcacgatctgatctcagtgagaaaaatcaacctgcaactcttggaacaagataa

SEQ ID NO: 28 - DNA, 1641 bp, Peste des petits ruminants virus
  PPRV-F protein, WT
  ref <308>: DATABASE ACCESSION NUMBER: GenBank: AJ849636.2
  ref <309>: DATABASE ENTRY DATE: 2005-07-16
atgacacgggtcgcaatcttgacatttctgtttcttttcccaaatgctgttgcgtgccagattcactggggcaatctatccaagatcgggattgtaggaacagggagtgccagctacaaggtgatgactaggccaagccaccaaactctggttataaagttaatgccaaatataacagccatcgacaattgtacaaagtcagagattgcagagtacaagagattgctgatcacagtgttaaagcctgtagaggatgctctgtcagtgataaccaagaatgtaagaccaattcaaactctgacacctgggcgtagaactcgccgctttgctggagctgttctggccggagtagcacttggagttgcgacagccgctcagataactgcaggagtcgcccttcatcaatcattgatgaactcccaagcaattgagagtttaaaaaccagtcttgagaagtcgaatcaggcaatagaggaaatcagacttgcaaataaggagaccatactagcagtacagggcgtccaggattatatcaacaatgagcttgtcccttctgtccatagaatgtcatgcgagctggtaggtcacaagctcggcctcaagctccttaggtactacaccgagatcctgtccatattcgggcccagccttcgagacccgatagctgccgaaatatcaatccaggcactcagttatgcattaggcggggacattaatagaatcctggacaagcttgggtatagcggtggggatttccttgccatcctagaaagcaagggaataaaggcccgggtaacatatgtggatacaagagattactttataattcttagcatcgcctacccaaccttatctgagatcaagggagtgatagttcacaagatagaagctataacatacaacattggggcacaggagtggtatactactatccctaaatatgtagccactcaggggtatctgatatcgaactttgatgagacgtcatgcgtattcactccggatgggacagtttgcagccagaatgcgttgtacccaatgagcccattgctccaggaatgtttccaggggtcaacaaaatcgtgcgccagaaccctagtttcagggaccataagtaatagatttatcctatcaaaagggaacctgattgcaaattgtgcgtcagttctgtgcaaatgctacacaacagagacagtcattagccaagatcccgacaaactactaactgttgtagcatccgacaagtgtcctgtagttgaggtggatggagtgacaatacaggtcggcagtcgagagtatccggattctgtatacctacacaaaatagacttaggtccagccatctccctagaaaaactggatgtaggcaccaatttaggcaatgcagtcacaagactggagaatgcaaaggagctcctagatgcatcagaccaaatactgaagactgttaaaggggtacctttcggtgggaatatgtacatagcactggcagcttgcattggggtatccctagggcttgtcacattaatatgctgctgcaaggggaggtgtaagaacaaggaagttcccatctccaaaatcaacccagggctcaaacccgacctgaccgggacctcaaagtcgtacgtgagatcactgtag

SEQ ID NO: 29 - DNA, 1641 bp, Artificial Sequence
  PPRV-F protein, silent mutation to remove internal AseI restriction site
atgacacgggtcgcaatcttgacatttctgtttcttttcccaaatgctgttgcgtgccagattcactggggcaatctatccaagatcgggattgtaggaacagggagtgccagctacaaggtgatgactaggccaagccaccaaactctggttataaagttaatgccaaatataacagccatcgacaattgtacaaagtcagagattgcagagtacaagagattgctgatcacagtgttaaagcctgtagaggatgctctgtcagtgataaccaagaatgtaagaccaattcaaactctgacacctgggcgtagaactcgccgctttgctggagctgttctggccggagtagcacttggagttgcgacagccgctcagataactgcaggagtcgcccttcatcaatcattgatgaactcccaagcaattgagagtttaaaaaccagtcttgagaagtcgaatcaggcaatagaggaaatcagacttgcaaataaggagaccatactagcagtacagggcgtccaggattatatcaacaatgagcttgtcccttctgtccatagaatgtcatgcgagctggtaggtcacaagctcggcctcaagctccttaggtactacaccgagatcctgtccatattcgggcccagccttcgagacccgatagctgccgaaatatcaatccaggcactcagttatgcattaggcggggacataaatagaatcctggacaagcttgggtatagcggtggggatttccttgccatcctagaaagcaagggaataaaggcccgggtaacatatgtggatacaagagattactttataattcttagcatcgcctacccaaccttatctgagatcaagggagtgatagttcacaagatagaagctataacatacaacattggggcacaggagtggtatactactatccctaaatatgtagccactcaggggtatctgatatcgaactttgatgagacgtcatgcgtattcactccggatgggacagtttgcagccagaatgcgttgtacccaatgagcccattgctccaggaatgtttccaggggtcaacaaaatcgtgcgccagaaccctagtttcagggaccataagtaatagatttatcctatcaaaagggaacctgattgcaaattgtgcgtcagttctgtgcaaatgctacacaacagagacagtcattagccaagatcccgacaaactactaactgttgtagcatccgacaagtgtcctgtagttgaggtggatggagtgacaatacaggtcggcagtcgagagtatccggattctgtatacctacacaaaatagacttaggtccagccatctccctagaaaaactggatgtaggcaccaatttaggcaatgcagtcacaagactggagaatgcaaaggagctcctagatgcatcagaccaaatactgaagactgttaaaggggtacctttcggtgggaatatgtacatagcactggcagcttgcattggggtatccctagggcttgtcaccttaatatgctgctgcaaggggaggtgtaagaacaaggaagttcccatctccaaaatcaacccagggctcaaacccgacctgaccgggacctcaaagtcgtacgtgagatcactgtag

SEQ ID NO: 30 - DNA, 681 bp, Rattus norvegicus
  Rat Tetraspanin CD9, WT
  ref <308>: DATABASE ACCESSION NUMBER: NCBI: NM_053018.1
  ref <309>: DATABASE ENTRY DATE: 2011-08-14
atgccggtcaaaggaggtagcaagtgcatcaaatacctgctctttggatttaacttcatcttctggctcgccggcatcgcagtgcttgccattggactatggctgcggttcgactctcagaccaagagcatcttcgagcaagaaactaatcattccagcttctacacaggagtgtacattctgattggagctggggccctcatgatgctagttggtttcctgggctgctgtggagctgtacaagagtcacagtgcatgctgggattgttcttcggattcctcttggtgatattcgccattgagatcgccgcagccgtctggggctatacccacaaggacgaggtgattaaagaactccaggagttttacaaggacacctaccaaaagttaaggaacaaggatgagccccagcgggaaacactcaaagccatccatatggcgttgaactgctgtggcatagctggtggtgtggagcagtttatctcggacatctgccccaaaaagcaggttctggaatccttccaggttaagtcctgcccggatgccatcgatgaggtcttccacagcaagttccacatcattggagcagtgggcatcggtatcgccgtggtgatgatcttcggtatgattttcagcatgattctgtgctgcgccatccgcaggagccgagaaatggtctag

SEQ ID NO: 31 - DNA, 1617 bp, Homo sapiens
  Homo sapiens endogenous retrovirus Syncytin1 precursor, WT
  ref <308>: DATABASE ACCESSION NUMBER: NCBI: NG_004112.1
  ref <309>: DATABASE ENTRY DATE: 2011-08-15
atggccctcccttatcatatttttctctttactgttcttttaccctctttcactctcactgcaccccctccatgccgctgtatgaccagtagctccccttaccaagagtttctatggagaatgcagcgtcccggaaatattgatgccccatcgtataggagtctttctaagggaacccccaccttcactgcccacacccatatgccccgcaactgctatcactctgccactctttgcatgcatgcaaatactcattattggacaggaaaaatgattaatcctagttgtcctggaggacttggagtcactgtctgttggacttacttcacccaaactggtatgtctgatgggggtggagttcaagatcaggcaagagaaaaacatgtaaaagaagtaatctcccaactcacccgggtacatggcacctctagcccctacaaaggactagatctctcaaaactacatgaaaccctccgtacccatactcgcctggtaagcctatttaataccaccctcactgggctccatgaggtctcggcccaaaaccctactaactgttggatatgcctccccctgaacttcaggccatatgtttcaatccctgtacctgaacaatggaacaacttcagcacagaaataaacaccacttccgttttagtaggacctcttgtttccaatctggaaataacccatacctcaaacctcacctgtgtaaaatttagcaatactacatacacaaccaactcccaatgcatcaggtgggtaactcctcccacacaaatagtctgcctaccctcaggaatattttttgtctgtggtacctcagcctatcgttgtttgaatggctcttcagaatctatgtgcttcctctcattcttagtgccccctatgaccatctacactgaacaagatttatacagttatgtcatatctaagccccgcaacaaaagagtacccattcttccttttgttataggagcaggagtgctaggtgcactaggtactggcattggcggtatcacaacctctactcagttctactacaaactatctcaagaactaaatggggacatggaacgggtcgccgactccctggtcaccttgcaagatcaacttaactccctagcagcagtagtccttcaaaatcgaagagctttagacttgctaaccgctgaaagagggggaacctgtttatttttaggggaagaatgctgttattatgttaatcaatccggaatcgtcactgagaaagttaaagaaattcgagatcgaatacaacgtagagcagaggagcttcgaaacactggaccctggggcctcctcagccaatggatgccctggattctccccttcttaggacctctagcagctataatattgctactcctctttggaccctgtatctttaacctccttgttaactttgtctcttccagaatcgaagctgtaaaactacaaatggagcccaagatgcagtccaagactaagatctaccgcagacccctggaccggcctgctagcccacgatctgatgttaatgacatcaaaggcacccctcctgaggaaatctcagctgcacaacctctactacgccccaattcagcaggaagcagttag

SEQ ID NO: 32 - DNA, 1617 bp, Artificial Sequence
  Homo sapiens endogenous retrovirus (HERV) Syncytin 1 precursor, with silent mutation to remove internal AseI and NheI restriction sites
atggccctcccttatcatatttttctctttactgttcttttaccctctttcactctcactgcaccccctccatgccgctgtatgaccagtagctccccttaccaagagtttctatggagaatgcagcgtcccggaaatattgatgccccatcgtataggagtctttctaagggaacccccaccttcactgcccacacccatatgccccgcaactgctatcactctgccactctttgcatgcatgcaaatactcattattggacaggaaaaatgataaatcctagttgtcctggaggacttggagtcactgtctgttggacttacttcacccaaactggtatgtctgatgggggtggagttcaagatcaggcaagagaaaaacatgtaaaagaagtaatctcccaactcacccgggtacatggcacctctagcccctacaaaggactagatctctcaaaactacatgaaaccctccgtacccatactcgcctggtaagcctatttaataccaccctcactgggctccatgaggtctcggcccaaaaccctactaactgttggatatgcctccccctgaacttcaggccatatgtttcaatccctgtacctgaacaatggaacaacttcagcacagaaataaacaccacttccgttttagtaggacctcttgtttccaatctggaaataacccatacctcaaacctcacctgtgtaaaatttagcaatactacatacacaaccaactcccaatgcatcaggtgggtaactcctcccacacaaatagtctgcctaccctcaggaatattttttgtctgtggtacctcagcctatcgttgtttgaatggctcttcagaatctatgtgcttcctctcattcttagtgccccctatgaccatctacactgaacaagatttatacagttatgtcatatctaagccccgcaacaaaagagtacccattcttccttttgttataggagcaggagtgctaggtgcactaggtactggcattggcggtatcacaacctctactcagttctactacaaactatctcaagaactaaatggggacatggaacgggtcgccgactccctggtcaccttgcaagatcaacttaactccctagcagcagtagtccttcaaaatcgaagagctttagacttgctaaccgctgaaagagggggaacctgtttatttttaggggaagaatgctgttattatgttaatcaatccggaatcgtcactgagaaagttaaagaaattcgagatcgaatacaacgtagagcagaggagcttcgaaacactggaccctggggcctcctcagccaatggatgccctggattctccccttcttaggacctctagcagctataatattgctactcctctttggaccctgtatctttaacctccttgttaactttgtctcttccagaatcgaagctgtaaaactacaaatggagcccaagatgcagtccaagactaagatctaccgcagacccctggaccggcctgcaagcccacgatctgatgttaatgacatcaaaggcacccctcctgaggaaatctcagctgcacaacctctactacgccccaattcagcaggaagcagttag

SEQ ID NO: 33 - DNA, 1617 bp, Homo sapiens
  Homo sapiens endogenous retrovirus (HERV) Syncytin 2 (HERV-FRD1)
  ref <308>: DATABASE ACCESSION NUMBER: NCBI: NM_207582.2
  ref <309>: DATABASE ENTRY DATE: 2011-09-09
atgggcctgctcctgctggttctcattctcacgccttcactagcagcctaccgccatcctgatttcccgttattggaaaaagctcagcaactgctccaaagtacaggatccccttactccaccaattgctggttatgtactagctcttccactgaaacaccagggacagcttatccagcctcgcccagagaatggacaagcatagaggcggaattacatatttcctatcgatgggaccctaatctgaaaggactgatgaggcctgcaaatagtcttctttcaacagtaaagcaagatttccctgatatccgccagaaacctcccattttcggacccatctttactaatatcaacctaatgggaatagcccctatttgtgttatggccaaaaggaaaaatggaacaaatgtaggcactcttccaagtacagtctgtaatgttactttcactgtagattctaaccaacagacttaccaaacatacacccacaaccaattccgccatcaaccaagattccccaaacctccaaatattacttttcctcagggaactttgctagataaatccagccggttttgccagggacgcccaagctcatgcagtactcgaaacttctggttccggcctgctgattataaccaatgtctgcaaatttccaacctcagctctacagcggaatgggttctattggaccaaactcgaaattctcttttttgggaaaataaaaccaagggagctaaccagagccaaacaccctgcgtccaagtcttagcaggcatgactatagccaccagctacctgggcatatcagcagtctcagaattttttggaacctccctcacccccttatttcatttccatatctctacatgccttaaaactcaaggagccttttatatttgtggccagtcgattcaccaatgcctccccagtaactggactggaacttgtaccataggctatgtaaccccagacatcttcatagcccctggcaatctctctcttccaataccaatctatgggaattccccgttgcccagggtgaggagggcaatccatttcattccccttctcgcgggactcggcattctagctggtacgggaaccggaattgctggaatcacaaaagcttccctcacctatagccagctctcaaaggaaatagccaacaacattgacaccatggctaaagccttaacgaccatgcaagaacaaatcgactctttagcagccgtagtccttcaaaatcgtcgaggactagacatgttaacggcagcacagggaggaatttgtttggccttagatgaaaaatgttgcttttgggtaaatcaatcaggaaaagtacaagacaacatcagacaactcctaaatcaagcctccagtttacgggaacgagccactcagggttggttaaattgggaaggaacttggaaatggttctcttgggttcttccccttacaggcccacttgttagtctcctacttttgctcctttttggtccatgtctcctaaatctaataacccaatttgtctcctctcgccttcaggccataaagctccagacgaatctcagtgcaggacgccatcctcgcaatattcaagagtcacccttctaa

SEQ ID NO: 34 - DNA, 1617 bp, Artificial Sequence
  Homo sapiens endogenous retrovirus Syncytin 2 precursor, with silent mutation to remove internal BamHI and EcoRI restriction sites
atgggcctgctcctgctggttctcattctcacgccttcactagcagcctaccgccatcctgatttcccgttattggaaaaagctcagcaactgctccaaagtacaggctccccttactccaccaattgctggttatgtactagctcttccactgaaacaccagggacagcttatccagcctcgcccagagaatggacaagcatagaggcggaattacatatttcctatcgatgggaccctaatctgaaaggactgatgaggcctgcaaatagtcttctttcaacagtaaagcaagatttccctgatatccgccagaaacctcccattttcggacccatctttactaatatcaacctaatgggaatagcccctatttgtgttatggccaaaaggaaaaatggaacaaatgtaggcactcttccaagtacagtctgtaatgttactttcactgtagattctaaccaacagacttaccaaacatacacccacaaccaattccgccatcaaccaagattccccaaacctccaaatattacttttcctcagggaactttgctagataaatccagccggttttgccagggacgcccaagctcatgcagtactcgaaacttctggttccggcctgctgattataaccaatgtctgcaaatttccaacctcagctctacagcggaatgggttctattggaccaaactcgaaattctcttttttgggaaaataaaaccaagggagctaaccagagccaaacaccctgcgtccaagtcttagcaggcatgactatagccactagctacctgggcatatcagcagtctcagaattttttggaacctccctcacccccttatttcatttccatatctctacatgccttaaaactcaaggagccttttatatttgtggccagtcgattcaccaatgcctccccagtaactggactggaacttgtaccataggctatgtaaccccagacatcttcatagcccctggcaatctctctcttccaataccaatctatggaaattccccgttgcccagggtgaggagggcaatccatttcattccccttctcgcgggactcggcattctagctggtacgggaaccggaattgctggaatcacaaaagcttccctcacctatagccagctctcaaaggaaatagccaacaacattgacaccatggctaaagccttaacgaccatgcaagaacaaatcgactctttagcagccgtagtccttcaaaatcgtcgaggactagacatgttaacggcagcacagggaggaatttgtttggccttagatgaaaaatgttgcttttgggtaaatcaatcaggaaaagtacaagacaacatcagacaactcctaaatcaagcctccagtttacgggaacgagccactcagggttggttaaattgggaaggaacttggaaatggttctcttgggttcttccccttacaggcccacttgttagtctcctacttttgctcctttttggtccatgtctcctaaatctaataacccaatttgtctcctctcgccttcaggccataaagctccagacgaatctcagtgcaggacgccatcctcgcaatattcaagagtcacccttctaa

SEQ ID NO: 35 - DNA, 1815 bp, Homo sapiens
  HERV3 WT
  ref <308>: DATABASE ACCESSION NUMBER: NCBI: NM_001007253.3
  ref <309>: DATABASE ENTRY DATE: 2011-08-14
atgctgggtatgaacatgctactcatcactttgttcttgctactccccttatccatgttaaaaggagaaccctgggagggatgcctccactgcacccacactacgtggtcggggaacatcatgactaaaaccctgttgtatcacacttattatgagtgtgctgggacctgcctaggaacttgtactcacaaccagacaacctactcagtctgtgacccaggaaggggccagccttatgtgtgttatgaccctaagtcttcacctgggacctggtttgaaattcatgtcgggtcaaaggaaggggatcttctaaaccaaaccaaggtatttccctctggcaaggatgtcgtatccttatactttgatgtttgccagatagtatccatgggctcactctttcccgtaatcttcagttccatggagtactatagtagctgccataaaaataggtatgcacaccctgcttgttccaccgattccccagtaacaacttgctgggactgcacaacgtggtccactaaccaacaatcactagggccaattatgcttaccaaaataccattagaaccagattgtaaaacaagcacttgcaattctgtaaatcttaccatcttagagccagatcagcccatatggacaacaggtttaaaagcaccgctaggggcacgagtcagcggtgaagaaattggcccaggagcctatgtctatctatatatcataaagaaaactcggacccgctcaacccaacagttccgagtttttgagtcattctatgagcatgttaaccagaaattgcctgagccccctcccttggccagtaatttattcgcccaactggctgaaaacatagccagcagcctgcacgttgcttcatgttatgtctgtgggggaatgaacatgggagaccaatggccatgggaagcaagggaactaatgccccaagataatttcacactaaccgcctcttccctcgaacctgcaccatcaagtcagagcatctggttcttaaaaacctccattattggaaaattctgtattgctcgctggggaaaggcctttacagacccagtaggagagttaacttgcctaggacaacaatattacaacgagacactaggaaagactttatggaggggcaaaagcaataattctgaatcaccacacccaagcccattctctcgtttcccatctttaaaccattcttggtaccaacttgaagctccaaatacctggcaggcaccctctggcctctactggatctgtgggccacaagcatatcgacaactgccagctaaatggtcaggggcctgtgtactggggacaattaggccgtccttcttcctaatgcccctaaaacagggagaagccttaggataccccatctatgatgaaactaaaaggaaaagcaaaagaggcataactataggagattggaaggacaatgaatggcctcctgaaagaataattcaatattatggcccagccacctgggcagaagatggaatgtggggataccgcaccccagtttacatgcttaaccgcattataagattgcaggcagtactagaaatcattaccaatgaaactgcaggggccttgaatctgcttgcccagcaagccacaaaaatgagaaatgtcatttatcaaaatagactggccttagactacctcctagcccaggaagagggagtatgcggaaagttcaaccttactaactgctgcctggaacttgatgacgaaggaaaggtcatcaaagaaataactgctaaaatccaaaagttagctcacatcccagttcagacttggaaaggatag

SEQ ID NO: 36 - DNA, 1815 bp, Artificial Sequence
  HERV3 cDNA (human codon optimized, CpG-free)
atgctgggtatgaacatgctactcatcactttgttcttgctactccccttatccatgttaaaaggagaaccctgggagggatgcctccactgcacccacactacgtggtcggggaacatcatgactaaaaccctgttgtatcacacttattatgagtgtgctgggacctgcctaggaacttgtactcacaaccagacaacctactcagtctgtgacccaggaaggggccagccttatgtgtgttatgaccctaagtcttcacctgggacatggtttgaaattcatgtcgggtcaaaggaaggggatcttctaaaccaaaccaaggtatttccctctggcaaggatgtcgtatccttatactttgatgtttgccagatagtatccatgggctcactctttcccgtaatcttcagttccatggagtactatagtagctgccataaaaataggtatgcacaccctgcttgttccaccgattccccagtaacaacttgctgggactgcacaacgtggtccactaaccaacaatcactagggccaattatgcttaccaaaataccattagaaccagattgtaaaacaagcacttgcaattctgtaaatcttaccatcttagagccagatcagcccatatggacaacaggtttaaaagcaccgctaggggcacgagtcagcggtgaagaaattggcccaggagcctatgtctatctatatatcataaagaaaactcggacccgctcaacccaacagttccgagtttttgagtcattctatgagcatgttaaccagaaattgcctgagccccctcccttggccagtaatttattcgcccaactggctgaaaacatagccagcagcctgcacgttgcttcatgttatgtctgtgggggaatgaacatgggagaccaatggccatgggaagcaagggaactaatgccccaagataatttcacactaaccgcctcttccctcgaacctgcaccatcaagtcagagcatctggttcttaaaaacctccattattggaaaattctgtattgctcgctggggaaaggcctttacagacccagtaggagagttaacttgcctaggacaacaatattacaacgagacactaggaaagactttatggaggggcaaaagcaataattctgaatcaccacacccaagcccattctctcgtttcccatctttaaaccattcttggtaccaacttgaagctcccaatacctggcaggcaccctctggcctctactggatctgtgggccacaagcatatcgacaactgcccgctaaatggtcaggggcctgtgtactggggacaattaggccgtccttcttcctaatgcccctaaaacagggagaagccttaggataccccatctatgatgaaactaaaaggaaaagcaaaagaggcataactataggagattggaaggacaatgaatggcctcctgaaagaataattcaatattatggccccgccacctgggcagaagatggaatgtggggataccgcaccccagtttacatgcttaaccgcattataagattgcaggcagtactagaaatcattaccaatgaaactgcaggggccttgaatctgcttgcccagcaagccacaaaaatgagaaatgtcatttatcaaaatagactggccttagactacctcctagcccaggaagagggagtatgcggaaagttcaaccttactaactgctgcctggaacttgatgacgaaggaaaggtcatcaaagaaataactgctaaaatccaaaagttagctcacatcccagttcagacttggaaaggatag

SEQ ID NO: 37 - DNA, 10 bp, Artificial Sequence
  Core SV40 origin sequence
  misc_feature 6: n = A,T,C or G
gaggcngcct

SEQ ID NO: 38 - protein, 511 aa, Vesicular stomatitis virus
  VSV-G WT protein
  ref <308>: DATABASE ACCESSION NUMBER: GenBank: CAC47944.1
  ref <309>: DATABASE ENTRY DATE: 2002-01-23
MKCLLYLAFLFIGVNCKFTIVFPHNQKGNWKNVPSNYHYCPSSSDLNWHNDLIGTAIQVKMPKSHKAIQADGWMCHASKWVTTCDFRWYGPKYITQSIRSFTPSVEQCKESIEQTKQGTWLNPGFPPQSCGYATVTDAEAVIVQVTPHHVLVDEYTGEWVDSQFINGKCSNYICPTVHNSTTWHSDYKVKGLCDSNLISMDITFFSEDGELSSLGKEGTGFRSNYFAYETGGKACKMQYCKHWGVRLPSGVWFEMADKDLFAAARFPECPEGSSISAPSQTSVDVSLIQDVERILDYSLCQETWSKIRAGLPISPVDLSYLAPKNPGTGPAFTIINGTLKYFETRYIRVDIAAPILSRMVGMISGTTTERELWDDWAPYEDVEIGPNGVLRTSSGYKFPLYMIGHGMLDSDLHLSSKAQVFEHPHIQDAASQLPDDESLFFGDTGLSKNPIELVEGWFSSWKSSIASFFFIIGLIIGLFLVLRVGIHLCIKLKHTKKRQIYTDIEMNRLGK

SEQ ID NO: 39 - protein, 98 aa, Avian orthoreovirus
  Avian Reovirus (ARV) p10 WT
  ref <308>: DATABASE ACCESSION NUMBER: GenBank: AAQ92364.1
  ref <309>: DATABASE ENTRY DATE: 2005-03-09
MLRMPPGSCNGATAVFGNVHCQAAQNTAGGDLQATSSIIAYWPYLAAGGGFLLIVIIFALLYCCKAKVKADAARSVFHRELVALSSGKHNAMAPPYDV

SEQ ID NO: 40 - protein, 98 aa, Avian orthoreovirus
  Avian Reovirus (S1133 strain) p10, WT
  ref <308>: DATABASE ACCESSION NUMBER: GenBank: AAK18186.1
  ref <309>: DATABASE ENTRY DATE: 2002-03-15
MLRMPPGSCNGATAVFGNVHCQAAQNTAGGDLQATSSIIAYWPYLAAGGGFLLIVIIFALLYCCKAKIKADAARSVFHRELVALSSGKHNAMAPPYDV

SEQ ID NO: 41 - protein, 125 aa, Reptilian orthoreovirus
  RRVp14 protein sequence
  ref <308>: DATABASE ACCESSION NUMBER: GenBank: AAP03134.1
  ref <309>: DATABASE ENTRY DATE: 2004-06-22
MGSGPSNFVNHAPGEAIVTGLEKGADKVAGTISHTIWEVIAGLVALLTFLAFGFWLFKYLQKRRERRRQLTEFQKRYLRNSYRLSEIQRPISQHEYEDPYEPPSRRKPPPPPYSTYVNIDNVSAI

SEQ ID NO: 42 - protein, 140 aa, Baboon orthoreovirus
  BRVp15 protein sequence
  ref <308>: DATABASE ACCESSION NUMBER: GenBank: AAL01373.1
  ref <309>: DATABASE ENTRY DATE: 2001-09-10
MGQRHSIVQPPAPPPNAFVEIVSSSTGIIIAVGIFAFIFSFLYKLLQWYNRKSKNKKRKEQIREQIELGLLSYGAGVASLPLLNVIAHNPGSVISATPIYKGPCTGVPNSRLLQITSGTAEENTRILNHDGRNPDGSINV

SEQ ID NO: 43 - protein, 667 aa, Gibbon ape leukemia virus
  GALV protein sequence
MVLLPGSMLLTSNLHHLRHQMSPGSWKRLIILLSCVFGGGGTSLQNKNPHQPMTLTWQVLSQTGDVVWDTKAVQPPWTWWPTLKPDVCALAASLESWDIPGTDVSSSKRVRPPDSDYTAAYKQITWGAIGCSYPRARTRMASSTFYVCPRDGRTLSEARRCGGLESLYCKEWDCETTGTGYWLSKSSKDLITVKWDQNSEWTQKFQQCHQTGWCNPLKIDFTDKGKLSKDWITGKTWGLRFYVSGHPGVQFTIRLKITNMPAVAVGPDLVLVEQGPPRTSLALPPPLPPREAPPPSLPDSNSTALATSAQTPTVRKTIVTLNTPPPTTGDRLFDLVQGAFLTLNATNPGATESCWLCLAMGPPYYEAIASSGEVAYSTDLDRCRWGTQGKLTLTEVSGHGLCIGKVPFTHQHLCNQTLSINSSGDHQYLLPSNHSWWACSTGLTPCLSTSVFNQTRDFCIQVQLIPRIYYYPEEVLLQAYDNSHPRTKREAVSLTLAVLLGLGITAGIGTGSTALIKGPIDLQQGLTSLQIAIDADLRALQDSVSKLEDSLTSLSEVVLQNRRGLDLLFLKEGGLCAALKEECCFYIDHSGAVRDSMKKLKEKLDKRQLERQKSQNWYEGWFNNSPWFTTLLSTIAGPLLLLLLLLILGPCIINKLVQFINDRISAC

SEQ ID NO: 44 - protein, 529 aa, Simian virus 5
  SV5F protein sequence
MGTIIQFLVVSCLLAGAGSLDPAALMQIGVIPTNVRQLMYYTEASSAFIVVKLMPTIDSPISGCNITSISSYNATVTKLLQPIGENLETIRNQLIPTRRRRRFAGVVIGLAALGVATAAQVTAAVALVKANENAAAILNLKNAIQKTNAAVADVVQATQSLGTAVQAVQDHINSVVSPAITAANCKAQDAIIGSILNLYLTELTTIFHNQITNPALSPITIQALRILLGSTLPTVVEKSFNTQISAAELLSSGLLTGQIVGLDLTYMQMVIKIELPTLTVQPATQIIDLATISAFINNQEVMAQLPTRVMVTGSLIQAYPASQCTITPNTVYCRYNDAQVLSDDTMACLQGNLTRCTFSPVVGSFLTRFVLFDGIVYANCRSMLCKCMQPAAVILQPSSSPVTVIDMYKCVSLQLDNLRFTITQLANVTYNSTIKLESSQILSIDPLDISQNLAAVNKSLSDALQHLAQSDTYLSAITSATTTSVLSIIAICLGSLGLILIILLSVVVWKLLTIVVANRNRMENFVYHK

SEQ ID NO: 45 - protein, 529 aa, Artificial Sequence
  SV5F G105A mutant protein sequence
MGTIIQFLVVSCLLAGAGSLDPAALMQIGVIPTNVRQLMYYTEASSAFIVVKLMPTIDSPISGCNITSISSYNATVTKLLQPIGENLETIRNQLIPTRRRRRFAAVVIGLAALGVATAAQVTAAVALVKANENAAAILNLKNAIQKTNAAVADVVQATQSLGTAVQAVQDHINSVVSPAITAANCKAQDAIIGSILNLYLTELTTIFHNQITNPALSPITIQALRILLGSTLPTVVEKSFNTQISAAELLSSGLLTGQIVGLDLTYMQMVIKIELPTLTVQPATQIIDLATISAFINNQEVMAQLPTRVMVTGSLIQAYPASQCTITPNTVYCRYNDAQVLSDDTMACLQGNLTRCTFSPVVGSFLTRFVLFDGIVYANCRSMLCKCMQPAAVILQPSSSPVTVIDMYKCVSLQLDNLRFTITQLANVTYNSTIKLESSQILSIDPLDISQNLAAVNKSLSDALQHLAQSDTYLSAITSATTTSVLSIIAICLGSLGLILIILLSVVVWKLLTIVVANRNRMENFVYHK

SEQ ID NO: 46 - protein, 529 aa, Artificial Sequence
  SV5F G109A mutant protein sequence
MGTIIQFLVVSCLLAGAGSLDPAALMQIGVIPTNVRQLMYYTEASSAFIVVKLMPTIDSPISGCNITSISSYNATVTKLLQPIGENLETIRNQLIPTRRRRRFAGVVIALAALGVATAAQVTAAVALVKANENAAAILNLKNAIQKTNAAVADVVQATQSLGTAVQAVQDHINSVVSPAITAANCKAQDAIIGSILNLYLTELTTIFHNQITNPALSPITIQALRILLGSTLPTVVEKSFNTQISAAELLSSGLLTGQIVGLDLTYMQMVIKIELPTLTVQPATQIIDLATISAFINNQEVMAQLPTRVMVTGSLIQAYPASQCTITPNTVYCRYNDAQVLSDDTMACLQGNLTRCTFSPVVGSFLTRFVLFDGIVYANCRSMLCKCMQPAAVILQPSSSPVTVIDMYKCVSLQLDNLRFTITQLANVTYNSTIKLESSQILSIDPLDISQNLAAVNKSLSDALQHLAQSDTYLSAITSATTTSVLSIIAICLGSLGLILIILLSVVVWKLLTIVVANRNRMENFVYHK

SEQ ID NO: 47 - protein, 529 aa, Artificial Sequence
  SV5F G114A mutant protein sequence
MGTIIQFLVVSCLLAGAGSLDPAALMQIGVIPTNVRQLMYYTEASSAFIVVKLMPTIDSPISGCNITSISSYNATVTKLLQPIGENLETIRNQLIPTRRRRRFAGVVIGLAALAVATAAQVTAAVALVKANENAAAILNLKNAIQKTNAAVADVVQATQSLGTAVQAVQDHINSVVSPAITAANCKAQDAIIGSILNLYLTELTTIFHNQITNPALSPITIQALRILLGSTLPTVVEKSFNTQISAAELLSSGLLTGQIVGLDLTYMQMVIKIELPTLTVQPATQIIDLATISAFINNQEVMAQLPTRVMVTGSLIQAYPASQCTITPNTVYCRYNDAQVLSDDTMACLQGNLTRCTFSPVVGSFLTRFVLFDGIVYANCRSMLCKCMQPAAVILQPSSSPVTVIDMYKCVSLQLDNLRFTITQLANVTYNSTIKLESSQILSIDPLDISQNLAAVNKSLSDALQHLAQSDTYLSAITSATTTSVLSIIAICLGSLGLILIILLSVVVWKLLTIVVANRNRMENFVYHK

SEQ ID NO: 48 - protein, 529 aa, Artificial Sequence
  SV5F G105A/G109A mutant protein sequence
MGTIIQFLVVSCLLAGAGSLDPAALMQIGVIPTNVRQLMYYTEASSAFIVVKLMPTIDSPISGCNITSISSYNATVTKLLQPIGENLETIRNQLIPTRRRRRFAAVVIALAALGVATAAQVTAAVALVKANENAAAILNLKNAIQKTNAAVADVVQATQSLGTAVQAVQDHINSVVSPAITAANCKAQDAIIGSILNLYLTELTTIFHNQITNPALSPITIQALRILLGSTLPTVVEKSFNTQISAAELLSSGLLTGQIVGLDLTYMQMVIKIELPTLTVQPATQIIDLATISAFINNQEVMAQLPTRVMVTGSLIQAYPASQCTITPNTVYCRYNDAQVLSDDTMACLQGNLTRCTFSPVVGSFLTRFVLFDGIVYANCRSMLCKCMQPAAVILQPSSSPVTVIDMYKCVSLQLDNLRFTITQLANVTYNSTIKLESSQILSIDPLDISQNLAAVNKSLSDALQHLAQSDTYLSAITSATTTSVLSIIAICLGSLGLILIILLSVVVWKLLTIVVANRNRMENFVYHK

SEQ ID NO: 49 - protein, 529 aa, Artificial Sequence
  SV5F G105A/G114A mutant protein sequence
MGTIIQFLVVSCLLAGAGSLDPAALMQIGVIPTNVRQLMYYTEASSAFIVVKLMPTIDSPISGCNITSISSYNATVTKLLQPIGENLETIRNQLIPTRRRRRFAAVVIGLAALAVATAAQVTAAVALVKANENAAAILNLKNAIQKTNAAVADVVQATQSLGTAVQAVQDHINSVVSPAITAANCKAQDAIIGSILNLYLTELTTIFHNQITNPALSPITIQALRILLGSTLPTVVEKSFNTQISAAELLSSGLLTGQIVGLDLTYMQMVIKIELPTLTVQPATQIIDLATISAFINNQEVMAQLPTRVMVTGSLIQAYPASQCTITPNTVYCRYNDAQVLSDDTMACLQGNLTRCTFSPVVGSFLTRFVLFDGIVYANCRSMLCKCMQPAAVILQPSSSPVTVIDMYKCVSLQLDNLRFTITQLANVTYNSTIKLESSQILSIDPLDISQNLAAVNKSLSDALQHLAQSDTYLSAITSATTTSVLSIIAICLGSLGLILIILLSVVVWKLLTIVVANRNRMENFVYHK

SEQ ID NO: 50 - protein, 529 aa, Artificial Sequence
  SV5F G109A/G114A mutant protein sequence
MGTIIQFLVVSCLLAGAGSLDPAALMQIGVIPTNVRQLMYYTEASSAFIVVKLMPTIDSPISGCNITSISSYNATVTKLLQPIGENLETIRNQLIPTRRRRRFAGVVIALAALAVATAAQVTAAVALVKANENAAAILNLKNAIQKTNAAVADVVQATQSLGTAVQAVQDHINSVVSPAITAANCKAQDAIIGSILNLYLTELTTIFHNQITNPALSPITIQALRILLGSTLPTVVEKSFNTQISAAELLSSGLLTGQIVGLDLTYMQMVIKIELPTLTVQPATQIIDLATISAFINNQEVMAQLPTRVMVTGSLIQAYPASQCTITPNTVYCRYNDAQVLSDDTMACLQGNLTRCTFSPVVGSFLTRFVLFDGIVYANCRSMLCKCMQPAAVILQPSSSPVTVIDMYKCVSLQLDNLRFTITQLANVTYNSTIKLESSQILSIDPLDISQNLAAVNKSLSDALQHLAQSDTYLSAITSATTTSVLSIIAICLGSLGLILIILLSVVVWKLLTIVVANRNRMENFVYHK

SEQ ID NO: 51 - protein, 529 aa, Artificial Sequence
  SV5F G105A/G109A/G114A mutant protein sequence
MGTIIQFLVVSCLLAGAGSLDPAALMQIGVIPTNVRQLMYYTEASSAFIVVKLMPTIDSPISGCNITSISSYNATVTKLLQPIGENLETIRNQLIPTRRRRRFAAVVIALAALAVATAAQVTAAVALVKANENAAAILNLKNAIQKTNAAVADVVQATQSLGTAVQAVQDHINSVVSPAITAANCKAQDAIIGSILNLYLTELTTIFHNQITNPALSPITIQALRILLGSTLPTVVEKSFNTQISAAELLSSGLLTGQIVGLDLTYMQMVIKIELPTLTVQPATQIIDLATISAFINNQEVMAQLPTRVMVTGSLIQAYPASQCTITPNTVYCRYNDAQVLSDDTMACLQGNLTRCTFSPVVGSFLTRFVLFDGIVYANCRSMLCKCMQPAAVILQPSSSPVTVIDMYKCVSLQLDNLRFTITQLANVTYNSTIKLESSQILSIDPLDISQNLAAVNKSLSDALQHLAQSDTYLSAITSATTTSVLSIIAICLGSLGLILIILLSVVVWKLLTIVVANRNRMENFVYHK

SEQ ID NO: 52 - protein, 569 aa, Gallus gallus
  Chicken endogenous retrovirus envelope protein sequence
MDQVIKEMFLGRPKTDSGEKPQQPAGGKKRKQKDTHPLLPSRGYFFFQMILVCVVIISVVPGVGGVHLLQQPGNVWVTWANKTGRTDFCLSLQSATSPFRTCLIGIPQYPLNTFKGYVTNVTACDNDADLASQTACLIKALNTTLPWDPQELDILGSQMIKNGTTRTCVTFGSVCYKENNRSRVCHNFDGNFNGTGGAEAELRDFIAKWKSDDLLIRPYVNQSWTMVSPINVESFSISRRYCGFTSNETRYYRGDLSNWCGSKRGKWSAGYSNRTKCSSNTTGCGGNCTTEWNYYAYGFTFGKQPEVLWNNGTAKALPPGIFLICGDRAWQGIPRNALGGPCYLGQLTMLSPNFTTWITYGPNITGHRRSRRSLSRLSPDCGDELQLWSVTARIFASFFAPGIAAAQALKEIERLACWSVKQANLTSLILNAMLEDTSSIRHAVLQNRAAIDFLLLAQGHGCQDVEGMCCFNLSDHSESIHKALQAMKEHTEKIRVEDDPIGDWFTRTFGDLGRWLAKGVKTLLFALLVIACLLAIIPCLIKCFQDCLLRTMNQFMDERIKYHRIREQL

SEQ ID NO: 53 - protein, 551 aa, Porcine parainfluenza virus
  SER F protein sequence
MGTIIQFLVVSCLLAGAGSLDPAALMQIGVIPTNVRQLMYYTEASSAFIVVKLMPTIDSPISGCNITSISSYNATVTKLLQPIGENLETIRNQLIPTRRRRRFAGVVIGLAALGVATAAQVTAAVALVKANKNAAAILNLKNAIQKTNTAVADVVQATQSLGTAVQAVQDHINSVVSPAITAANCKAQDAIIGSILNLYLTELTTIFHNQITNPALSPITIQALRILLGSTLPTVVEKSFNTQISAAELLSSGLLTGQIVGLDLTYMQMVIKIELPTLTVQPATQIIDLATISAFINNQEVMAQLPTRVIVTGSLIQAYPASQCTITPNTVYCRYNDAQVLSDDTMACLQGNLTRCTFSPVVGSFLTRFMLFDGIVYANCRSMLCKCMQPAAVILQPSSSPVTVIDMYKCVSLQLDNLRFTITQLANVTYNSTIKLETSQILPIDPLDISQNLAAVNKSLSDALQHLAQSDTYLSAITSATTTSVLSIMAICLGSLGLILIILLSVVVWKLLTIVTANRNRMENFVYHNSAFHHSRSDLSEKNQPATLGTR

SEQ ID NO: 54 - protein, 546 aa, Peste des petits ruminants virus
  PPRV-F protein sequence
MTRVAILTFLFLFPNAVACQIHWGNLSKIGIVGTGSASYKVMTRPSHQTLVIKLMPNITAIDNCTKSEIAEYKRLLITVLKPVEDALSVITKNVRPIQTLTPGRRTRRFAGAVLAGVALGVATAAQITAGVALHQSLMNSQAIESLKTSLEKSNQAIEEIRLANKETILAVQGVQDYINNELVPSVHRMSCELVGHKLGLKLLRYYTEILSIFGPSLRDPIAAEISIQALSYALGGDINRILDKLGYSGGDFLAILESKGIKARVTYVDTRDYFIILSIAYPTLSEIKGVIVHKIEAITYNIGAQEWYTTIPKYVATQGYLISNFDETSCVFTPDGTVCSQNALYPMSPLLQECFQGSTKSCARTLVSGTISNRFILSKGNLIANCASVLCKCYTTETVISQDPDKLLTVVASDKCPVVEVDGVTIQVGSREYPDSVYLHKIDLGPAISLEKLDVGTNLGNAVTRLENAKELLDASDQILKTVKGVPFGGNMYIALAACIGVSLGLVTLICCCKGRCKNKEVPISKINPGLKPDLTGTSKSYVRSL

SEQ ID NO: 55 - protein, 226 aa, Rattus norvegicus
  Rat Tetraspanin CD9 protein sequence
MPVKGGSKCIKYLLFGFNFIFWLAGIAVLAIGLWLRFDSQTKSIFEQETNHSSFYTGVYILIGAGALMMLVGFLGCCGAVQESQCMLGLFFGFLLVIFAIEIAAAVWGYTHKDEVIKELQEFYKDTYQKLRNKDEPQRETLKAIHMALNCCGIAGGVEQFISDICPKKQVLESFQVKSCPDAIDEVFHSKFHIIGAVGIGIAVVMIFGMIFSMILCCAIRRSREMV

SEQ ID NO: 56 - protein, 538 aa, Homo sapiens
  HERV Syncytin 1 precursor protein sequence
MALPYHIFLFTVLLPSFTLTAPPPCRCMTSSSPYQEFLWRMQRPGNIDAPSYRSLSKGTPTFTAHTHMPRNCYHSATLCMHANTHYWTGKMINPSCPGGLGVTVCWTYFTQTGMSDGGGVQDQAREKHVKEVISQLTRVHGTSSPYKGLDLSKLHETLRTHTRLVSLFNTTLTGLHEVSAQNPTNCWICLPLNFRPYVSIPVPEQWNNFSTEINTTSVLVGPLVSNLEITHTSNLTCVKFSNTTYTTNSQCIRWVTPPTQIVCLPSGIFFVCGTSAYRCLNGSSESMCFLSFLVPPMTIYTEQDLYSYVISKPRNKRVPILPFVIGAGVLGALGTGIGGITTSTQFYYKLSQELNGDMERVADSLVTLQDQLNSLAAVVLQNRRALDLLTAERGGTCLFLGEECCYYVNQSGIVTEKVKEIRDRIQRRAEELRNTGPWGLLSQWMPWILPFLGPLAAIILLLLFGPCIFNLLVNFVSSRIEAVKLQMEPKMQSKTKIYRRPLDRPASPRSDVNDIKGTPPEEISAAQPLLRPNSAGSS

SEQ ID NO: 57 - protein, 538 aa, Homo sapiens
  HERV Syncytin 2 protein sequence
MGLLLLVLILTPSLAAYRHPDFPLLEKAQQLLQSTGSPYSTNCWLCTSSSTETPGTAYPASPREWTSIEAELHISYRWDPNLKGLMRPANSLLSTVKQDFPDIRQKPPIFGPIFTNINLMGIAPICVMAKRKNGTNVGTLPSTVCNVTFTVDSNQQTYQTYTHNQFRHQPRFPKPPNITFPQGTLLDKSSRFCQGRPSSCSTRNFWFRPADYNQCLQISNLSSTAEWVLLDQTRNSLFWENKTKGANQSQTPCVQVLAGMTIATSYLGISAVSEFFGTSLTPLFHFHISTCLKTQGAFYICGQSIHQCLPSNWTGTCTIGYVTPDIFIAPGNLSLPIPIYGNSPLPRVRRAIHFIPLLAGLGILAGTGTGIAGITKASLTYSQLSKEIANNIDTMAKALTTMQEQIDSLAAVVLQNRRGLDMLTAAQGGICLALDEKCCFWVNQSGKVQDNIRQLLNQASSLRERATQGWLNWEGTWKWFSWVLPLTGPLVSLLLLLLFGPCLLNLITQFVSSRLQAIKLQTNLSAGRHPRNIQESPF

SEQ ID NO: 58 - protein, 604 aa, Homo sapiens
  HERV3 WT protein
MLGMNMLLITLFLLLPLSMLKGEPWEGCLHCTHTTWSGNIMTKTLLYHTYYECAGTCLGTCTHNQTTYSVCDPGRGQPYVCYDPKSSPGTWFEIHVGSKEGDLLNQTKVFPSGKDVVSLYFDVCQIVSMGSLFPVIFSSMEYYSSCHKNRYAHPACSTDSPVTTCWDCTTWSTNQQSLGPIMLTKIPLEPDCKTSTCNSVNLTILEPDQPIWTTGLKAPLGARVSGEEIGPGAYVYLYIIKKTRTRSTQQFRVFESFYEHVNQKLPEPPPLASNLFAQLAENIASSLHVASCYVCGGMNMGDQWPWEARELMPQDNFTLTASSLEPAPSSQSIWFLKTSIIGKFCIARWGKAFTDPVGELTCLGQQYYNETLGKTLWRGKSNNSESPHPSPFSRFPSLNHSWYQLEAPNTWQAPSGLYWICGPQAYRQLPAKWSGACVLGTIRPSFFLMPLKQGEALGYPIYDETKRKSKRGITIGDWKDNEWPPERIIQYYGPATWAEDGMWGYRTPVYMLNRIIRLQAVLEIITNETAGALNLLAQQATKMRNVIYQNRLALDYLLAQEEGVCGKFNLTNCCLELDDEGKVIKEITAKIQKLAHIPVQTWKG

SEQ ID NO: 59 - protein, 20 aa, Artificial Sequence
  Simian virus-5 (SV5) F (N-terminal fusogenic peptide of F1 subunit)
FAGVVIGLAALGVATAAQVT

SEQ ID NO: 60 - protein, 20 aa, Artificial Sequence
  Human parainfluenza virus-2 (HPIV2) (N-terminal fusogenic peptide of F1 subunit)
FAGVVVGLAALGVATAAQIT

SEQ ID NO: 61 - protein, 20 aa, Artificial Sequence
  Simian virus 41 (SV41) (N-terminal fusogenic peptide of F1 subunit)
FAGVVVGLAALGVATAAQIT

SEQ ID NO: 62 - protein, 20 aa, Artificial Sequence
  MUMPS (N-terminal fusogenic peptide of F1 subunit)
FAGIAIGIAALGVATAAQVT

SEQ ID NO: 63 - protein, 20 aa, Artificial Sequence
  MV (N-terminal fusogenic peptide of the F1 subunit)
FAGVVLAGAALGVATAAQIT

SEQ ID NO: 64 - protein, 20 aa, Artificial Sequence
  R PEST (N-terminal fusogenic peptide of the F1 subunit)
FAGVALAGAALGVATAAQIT

SEQ ID NO: 65 - protein, 20 aa, Artificial Sequence
  CDV (N-terminal fusogenic peptide of the F1 subunit)
FAGVVLAGAALGVATAAQIT

SEQ ID NO: 66 - protein, 20 aa, Artificial Sequence
  HPIV1 (N-terminal fusogenic peptide of the F1 subunit)
FFGAVIGTIALGVATAAQIT

SEQ ID NO: 67 - protein, 20 aa, Artificial Sequence
  HPIV3 (N-terminal fusogenic peptide of the F1 subunit)
FFGGVIGTIALGVATSAQIT

SEQ ID NO: 68 - protein, 20 aa, Artificial Sequence
  NDV (N-terminal fusogenic peptide of the F1 subunit)
FAGAIIGSVALGVATAAQIT

SEQ ID NO: 69 - protein, 20 aa, Artificial Sequence
  Sendai (N-terminal fusogenic protein of the F1 subunit)
FFGAVIGTIALGVATSAQIT

SEQ ID NO: 70 - DNA, 1554 bp, Artificial Sequence
  VSV-G (unmodified) plus flanking NheI and BamHI restriction sites
gctagctagaccatgaagtgccttttgtacttagcctttttattcattggggtgaattgcaagttcaccatagtttttccacacaaccaaaaaggaaactggaaaaatgttccttctaattaccattattgcccgtcaagctcagatttaaattggcataatgacttaataggcacagccttacaagtcaaaatgcccaagagtcacaaggctattcaagcagacggttggatgtgtcatgcttccaaatgggtcactacttgtgatttccgctggtatggaccgaagtatataacacattccatccgatccttcactccatctgtagaacaatgcaaggaaagcattgaacaaacgaaacaaggaacttggctgaatccaggcttccctcctcaaagttgtggatatgcaactgtgacggatgccgaagcagtgattgtccaggtgactcctcaccatgtgctggttgatgaatacacaggagaatgggttgattcacagttcatcaacggaaaatgcagcaattacatatgccccactgtccataactctacaacctggcattctgactataaggtcaaagggctatgtgattctaacctcatttccatggacatcaccttcttctcagaggacggagagctatcatccctgggaaaggagggcacagggttcagaagtaactactttgcttatgaaactggaggcaaggcctgcaaaatgcaatactgcaagcattggggagtcagactcccatcaggtgtctggttcgagatggctgataaggatctctttgctgcagccagattccctgaatgcccagaagggtcaagtatctctgctccatctcagacctcagtggatgtaagtctaattcaggacgttgagaggatcttggattattccctctgccaagaaacctggagcaaaatcagagcgggtcttccaatctctccagtggatctcagctatcttgctcctaaaaacccaggaaccggtcctgctttcaccataatcaatggtaccctaaaatactttgagaccagatacatcagagtcgatattgctgctccaatcctctcaagaatggtcggaatgatcagtggaactaccacagaaagggaactgtgggatgactgggcaccatatgaagacgtggaaattggacccaatggagttctgaggaccagttcaggatataagtttcctttatacatgattggacatggtatgttggactccgatcttcatcttagctcaaaggctcaggtgttcgaacatcctcacattcaagacgctgcttcgcaacttcctgatgatgagagtttattttttggtgatactgggctatccaaaaatccaatcgagcttgtagaaggttggttcagtagttggaaaagctctattgcctcttttttctttatcatagggttaatcattggactattcttggttctccgagttggtatccatctttgcattaaattaaagcacaccaagaaaagacagatttatacagacatagagatgaaccgacttggaaagtgaggatcc

SEQ ID NO: 71 - DNA, 1554 bp, Artificial Sequence
  VSV-G (human codon optimized, CpG-free) plus flanking NheI and BamHI restriction sites
gctagctagaccatgaaatgtctgctctacctggctttcctgtttataggggttaattgtaagtttactattgtcttccctcacaaccagaagggaaattggaagaatgtgcccagcaattaccactattgtcccagctcctctgatctcaattggcataatgacctgattggcacagccattcaggtgaaaatgcctaaaagtcacaaggctattcaagctgatggctggatgtgtcatgcctctaagtgggtgaccacctgtgatttcaggtggtatggacctaagtatattacacagtctatcagatcattcacaccctctgtggagcagtgtaaggaaagtattgagcagacaaaacaggggacttggctcaacccaggctttccacctcagagctgtggttatgctacagtgacagatgcagaggcagtgattgttcaggtcactcctcaccatgtgctggtggatgagtacactggtgaatgggttgacagccagttcattaatggcaagtgctccaattacatctgccctactgtgcataacagtacaacatggcacagtgattacaaagttaagggcctctgtgattccaacctcatcagcatggatatcaccttcttctctgaagatggagaactgtcaagtctgggtaaagagggaactgggttcaggagcaattactttgcatatgagacaggtggaaaagcctgtaagatgcagtattgcaaacactggggtgtcagactgccatcaggtgtgtggtttgaaatggcagacaaagacctctttgcagctgccaggtttcctgagtgtccagagggctcctccattagtgctccaagccaaacatctgttgatgtctcactgattcaggatgtggaaagaatcctggattacagtctgtgtcaggaaacctggagtaagattagagctggtctccctatctcacctgtggatctgagctatctggctccaaagaatcctgggacaggccctgcctttacaattatcaatggaactctcaagtactttgagactagatatatcagggttgacatagcagctccaatcctgtcaagaatggtggggatgatctcaggtaccacaacagaaagagaactgtgggatgactgggctccttatgaggatgtggagattggacctaatggggtgctgaggacctcctcaggctataagttcccactctatatgattggtcatggaatgctggactcagacctgcacctcagttccaaagcacaagtgtttgagcacccccacatccaggatgctgcatcccagctgcctgatgatgagagcctgttctttggagatacagggctgagtaagaaccctattgaactggtggagggatggttctcttcttggaaaagttctattgcctccttctttttcattataggcctgatcattggactctttctggtgctgagagttgggattcatctgtgtatcaagctgaaacacaccaaaaagagacagatctacacagatattgagatgaacaggctggggaagtaaggatcc

SEQ ID NO: 72 - DNA, 315 bp, Artificial Sequence
  ARVp10 (unmodified) plus flanking NheI and BamHI restriction sites
gctagctagaccatgctgcgtatgcctcccggttcgtgtaacggtgcgactgctgtatttggtaacgttcattgtcaggcagctcaaaacacggcaggtggtgatttgcaagctacgtcatccataattgcatattggccttatctagcggcgggtggtggtttcttattaattgttatcattttcgctcttctatactgttgtaaggctaaggtcaaggcggacgctgcacgtagtgtcttccatcgtgagctggtagcgttgagttctggtaagcacaatgcaatggctccgccatacgacgtttgaggatcc

SEQ ID NO: 73 - DNA, 315 bp, Artificial Sequence
  ARVp10 (human codon optimized, CpG-free) plus flanking NheI and BamHI restriction sites
gctagctagaccatgctcagaatgcctccaggaagttgtaatggtgctacagctgtgtttggaaatgttcactgtcaagcagctcagaatactgctggtggggatctgcaggccacttcatccatcattgcatactggccttacctggcagctggaggtggctttctcctgatagtcattatttttgccctgctgtactgttgcaaggccaaagtcaaagcagatgctgccagaagtgtcttccacagggagctggtggctctcagctctggcaagcacaatgctatggctcctccatatgatgtttaaggatcc

SEQ ID NO: 74 - DNA, 315 bp, Artificial Sequence
  ARVp10, strain S1133 (unmodified) plus flanking NheI and BamHI restriction sites
gctagctagaccatgctgcgtatgcctcccggttcatgtaacggtgcgactgctgtatttggtaacgttcattgtcaggcagctcagaacacggcaggtggtgatttgcaagctacgtcatccataattgcatattggccttatctagcggcgggtggtggtttcttattaattgttatcattttcgctcttctatactgttgtaaggctaagatcaaggcggacgctgcacgtagtgtcttccatcgtgagctggtagcgttgagttctggtaagcacaatgcaatggctccgccatacgacgtttgaggatcc

SEQ ID NO: 75 - DNA, 315 bp, Artificial Sequence
  ARVp10, strain S1133 (human codon optimized, CpG-free) plus flanking NheI and BamHI restriction sites
gctagctagaccatgctcagaatgcctccaggaagttgtaatggtgctacagctgtgtttggaaatgttcactgtcaagcagctcagaatactgctggtggggatctgcaggccacttcatccatcattgcatactggccttacctggcagctggaggtggctttctcctgatagtcattatttttgccctgctgtactgttgcaaggccaaaatcaaagcagatgctgccagaagtgtcttccacagggagctggtggctctcagctctggcaagcacaatgctatggctcctccatatgatgtttaaggatcc

SEQ ID NO: 76 - DNA, 396 bp, Artificial Sequence
  RRVp14 (unmodified) plus flanking NheI and BamHI restriction sites
gctagctagaccatggggagtggaccctctaatttcgtcaatcacgcacctggagaagcaattgtaaccggtttggagaaaggggcagataaagtagctggaacgatatcacatacgatttgggaagtgatcgccggattagtagccttgctgacattcttagcgtttggcttctggttgttcaagtatctccaaaagagaagagaaagaaggagacaactcactgagttccaaaaacggtatctacggaatagctacaggttgagtgagatccagagacctatatcacagcacgaatacgaagacccatacgagccaccaagtcgtaggaaaccaccccctcctccttatagcacatacgtcaacatcgataatgtctcagccatttagggatcc

SEQ ID NO: 77 - DNA, 393 bp, Artificial Sequence
  RRVp14 (human codon optimized, CpG-free) plus flanking NheI and BamHI restriction sites
gctagcaccatgggatctgggccatctaattttgttaatcatgcacctggggaagccattgtgactgggctggagaagggagcagataaagttgctgggaccatcagccacactatttgggaggtcattgcaggcttggtggctcttttgaccttcctggcatttggcttctggctgttcaagtacctgcagaagaggagagaaagaaggagacagctcacagaattccagaagaggtatctgagaaattcctacagattgtcagaaattcaaaggccaatttctcagcatgagtatgaagacccctatgagcctccatccagaaggaaacctccccctccaccttactccacttatgtgaatattgacaatgtatctgccatataaggatcc

SEQ ID NO: 78 - DNA, 438 bp, Artificial Sequence
  BRVp15 (unmodified) plus flanking NheI and BamHI restriction sites
gctagcaccatgggtcaaagacattcaatagttcaaccaccagctccaccgccaaatgcttttgttgaaattgtgagcagttctactggcattataatcgctgttggcatatttgcatttatattctcatttttatataagttgctgcagtggtacaatcgtaagtcaaagaataagaaacgtaaagagcaaattagagaacaaattgagcttggtttattatcatatggtgctggagtagcatcacttcctttgctcaacgttattgcacataatcctggatcagttatctcggctacccctatctataaaggtccgtgcactggtgtacctaattcgcgcctacttcaaatcacgagcgggactgcagaagagaacactagaattttgaatcatgatggaagaaacccagatggaagtatcaacgtttgaggatcc

SEQ ID NO: 79 - DNA, 35 bp, Artificial Sequence
  SV40 ori with 3 TAg binding sites (generic)
  misc_feature 6, 12, 18, 24, 30: n = A,T,C or G
gaggcngaggcngaggcngcctcngcctcngcctc

SEQ ID NO: 80 - DNA, 2019 bp, Artificial Sequence
  GALV (unmodified) plus flanking NheI and BamHI restriction sites
gctagcaccatggtattgctgcctgggtccatgcttctcacctcaaacctgcaccaccttcggcaccagatgagtcctgggagctggaaaagactgatcatcctcttaagctgcgtattcggcggcggcgggacgagtctgcaaaataagaacccccaccagcccatgaccctcacttggcaggtactgtcccaaactggagacgttgtctgggatacaaaggcagtccagcccccttggacttggtggcccacacttaaacctgatgtatgtgccttggcggctagtcttgagtcctgggatatcccgggaaccgatgtctcgtcctctaaacgagtcagacctccggactcagactatactgccgcttataagcaaatcacctggggagccatagggtgcagctaccctcgggctaggactagaatggcaagctctaccttctacgtatgtccccgggatggccggaccctttcagaagctagaaggtgcggggggctagaatccctatactgtaaagaatgggattgtgagaccacggggaccggttattggctatctaaatcctcaaaagacctcataactgtaaaatgggaccaaaatagcgaatggactcaaaaatttcaacagtgtcaccagaccggctggtgtaacccccttaaaatagatttcacagacaaaggaaaattatccaaggactggataacgggaaaaacctggggattaagattctatgtgtctggacatccaggcgtacagttcaccattcgcttaaaaatcaccaacatgccagctgtggcagtaggtcctgacctcgtccttgtggaacaaggacctcctagaacgtccctcgctctcccacctcctcttcccccaagggaagcgccaccgccatctctccccgactctaactccacagccctggcgactagtgcacaaactcccacggtgagaaaaacaattgttaccctaaacactccgcctcccaccacaggcgacagactttttgatcttgtgcagggggccttcctaaccttaaatgctaccaacccaggggccactgagtcttgctggctttgtttggccatgggccccccttattatgaagcaatagcctcatcaggagaggtcgcctactccaccgaccttgaccggtgccgctgggggacccaaggaaagctcaccctcactgaggtctcaggacacgggttgtgcataggaaaggtgccctttacccatcagcatctctgcaatcagaccctatccatcaattcctccggagaccatcagtatctgctcccctccaaccatagctggtgggcttgcagcactggcctcaccccttgcctctccacctcagtttttaatcagactagagatttctgtatccaggtccagctgattcctcgcatctattactatcctgaagaagttttgttacaggcctatgacaattctcaccccaggactaaaagagaggctgtctcacttaccctagctgttttactggggttgggaatcacggcgggaataggtactggttcaactgccttaattaaaggacctatagacctccagcaaggcctgacaagcctccagatcgccatagatgctgacctccgggccctccaagactcagtcagcaagttagaggactcactgacttccctgtccgaggtagtgctccaaaataggagaggccttgacttgctgtttctaaaagaaggtggcctctgtgcggccctaaaggaagagtgctgtttttacatagaccactcaggtgcagtacgggactccatgaaaaaactcaaagaaaaactggataaaagacagttagagcgccagaaaagccaaaactggtatgaaggatggttcaataactccccttggttcactaccctgctatcaaccatcgctgggcccctattactcctccttctgttgctcatcctcgggccatgcatcatcaataagttagttcaattcatcaatgataggataagtgcatgttaaggatcc

SEQ ID NO: 81 - DNA, 2013 bp, Artificial Sequence
  GALV (human codon optimized, CpG-free) plus flanking NheI and BamHI restriction sites
gctagcaccatggtcctgctgccaggctcaatgctgctgaccagcaatctccaccacctgagacaccagatgtcacctgggtcctggaagagacttatcattcttctgtcctgtgtgtttgggggtggaggcaccagcctgcaaaataagaacccacatcagcccatgaccctcacctggcaggtcctgagccagacaggtgatgttgtctgggataccaaagcagtccagcccccctggacttggtggcccaccttgaaacctgatgtctgtgccctggcagctagtctggagagctgggacatcccaggcactgatgtcagcagcagcaagagggttaggccacctgacagtgactacactgcagcctacaagcagatcacctggggagccattggctgctcctaccctagagctagaaccagaatggcctccagtaccttctatgtctgccctagagatggcagaactctgtctgaggccaggagatgtggtggactggaatccctctactgcaaagagtgggactgtgagactactggcacaggctattggttgtccaagtcatccaaggacttgatcactgtgaagtgggatcagaattcagagtggacccagaaatttcagcaatgccaccagacaggctggtgcaaccccttgaagattgactttacagataaggggaagctcagtaaagactggatcacaggcaaaacctggggactgaggttctatgtttctggccatccaggtgttcagttcaccatcagattgaaaatcaccaatatgccagctgtggcagtgggtcctgaccttgtgctggtggaacagggcccacccaggacatccttggccttgcctccacccctccctcccagggaagccccccctccaagcttgcctgactccaattctacagctctggctactagtgcccaaactcctactgtgaggaagaccattgtcacactcaatacaccccctccaactacaggagacaggttgtttgaccttgtgcaaggtgccttccttacacttaatgccaccaaccctggagccacagaaagttgttggctgtgcctggcaatgggtccaccctactatgaggcaattgcaagttctggtgaagtggcatatagcactgacctggatagatgtaggtgggggacccagggaaaactcacacttactgaagtgagtgggcatggcctgtgcattggaaaagtcccattcacacaccaacatctgtgcaaccaaacactctccatcaactcttctggtgaccaccagtacctgcttccaagcaaccacagctggtgggcctgcagcactgggctgaccccctgcctgagcacctctgtgttcaatcagacaagagatttctgtatccaggtgcagctcattcccagaatctactactatcctgaggaggtgctgctgcaagcctatgacaacagtcatcccaggactaagagggaagcagtgagtctcaccctggctgttctgctgggcctgggaatcacagctgggattggtacaggctcaacagcccttatcaagggccccattgacctgcagcaaggactgacttcccttcagattgcaattgatgctgatctgagagccctgcaggattctgtgtccaaactggaggacagccttacctctctctcagaagtggttcttcagaacaggagaggactggacttgctctttctcaaagagggagggctttgtgctgccctcaaggaggagtgttgcttttacattgatcattctggggctgttagagattcaatgaaaaagctcaaggagaaattggataaaaggcagctggaaagacagaagtctcaaaactggtatgaagggtggttcaacaatagtccttggttcactaccttgctgagcactattgctggcccactcttgctgctgttgctcctgctcatcctggggccctgtatcatcaacaagctggtgcagtttatcaatgacaggatcagtgcctgctga

SEQ ID NO: 82 - DNA, 1608 bp, Artificial Sequence
  SV5F WT (human codon optimized, CpG-free) plus flanking NheI and BamHI restriction sites
gctagctagaccatggggactattattcaatttctggtggtcagctgtctgctggctggggcaggatctctggaccctgctgccctcatgcagattggggtgattcctaccaatgtcaggcagctcatgtattatacagaagcttcttctgcctttattgttgtgaagctgatgcctactatagacagtcccatctctggctgtaacattacttcaataagttcctataatgcaactgtgactaagctgctccagcccataggggaaaatctggaaactataagaaaccagctgattcctacaagaaggagaaggagatttgctggagttgtgattggcctggctgccctgggtgtggctacagcagcacaagtgacagctgcagtggccctggtcaaagcaaatgagaatgcagctgccatcctgaatctcaagaatgccatccagaagactaatgctgcagttgctgatgtggtgcaagccacacaatctctgggcacagcagtgcaagcagtgcaggatcatatcaactctgttgtgagcccagcaattacagctgccaactgtaaagcacaagatgccatcattggtagcatactcaatctgtatctgactgagctgaccacaatctttcacaaccagattaccaacccagccctgtctccaattaccatccaggccctcaggatactgctgggctctacactgcccactgtggttgaaaagagctttaatacccagatcagtgcagctgagctgctgtcttctggactcctgacagggcagattgttgggctggacctcacctacatgcagatggttatcaagattgaactgcctacactgactgttcagcctgccactcagattattgatctggcaacaatttcagcctttatcaataaccaggaagtgatggctcagctcccaacaagggttatggtgactggcagtctgatacaggcataccctgccagccagtgcaccataacacccaatacagtgtattgcaggtacaatgatgcccaggtgctgtctgatgacacaatggcctgcctgcaggggaatctgactaggtgcacttttagtccagtggtgggcagctttctgactaggtttgtgctgtttgatggcatagtctatgccaactgcaggtccatgctctgcaaatgcatgcagcctgcagcagttattctgcagccaagtagcagtccagtgacagtgatagacatgtataagtgtgtttctctgcaactggacaacctgaggttcaccatcactcagctggcaaatgttacttacaactcaactattaaactggagtcaagtcagattctgagcattgaccctctggatatctcccagaatctggctgcagtgaataagagcctcagtgatgcactccaacatctggcccagtcagacacctatctctcagccattacctctgcaactaccacctcagtcctgagcattatagctatatgtctgggatcactgggcctgattctgatcatactgctgagtgttgtggtgtggaagctgctgacaattgtggtggccaacaggaataggatggaaaattttgtgtaccacaaatagggatcc

SEQ ID NO: 83 - DNA, 1608 bp, Artificial Sequence
  SV5F WT (unmodified) plus flanking NheI and BamHI restriction sites
gctagctagaccatgggtactataattcaatttctggtggtctcctgtctattggcaggagcaggcagccttgatccagcagccctcatgcaaatcggtgtcattccaacaaatgtccggcaacttatgtattatactgaggcctcatcagcattcattgttgtgaagttaatgcctacaattgactcgccgattagtggatgtaatataacatcaatttcaagctataatgcaacagtgacaaaactcctacagccgatcggtgagaatttggagacgattaggaaccagttgattccaactcggaggagacgccggtttgcaggggtggtgattggattagctgcattaggagtagctactgccgcacaggtcactgccgcagtggcactagtaaaggcaaatgaaaatgctgcggctatactcaatctcaaaaatgcaatccaaaaaacaaatgcagcagttgcagatgtggtccaggccacacaatcactaggaacggcagttcaagcagttcaagatcacataaacagtgtggtaagtccagcaattacagcagccaattgtaaggcccaagatgctatcattggctcaatcctcaatctctatttgaccgagttgacaaccatcttccacaatcaaattacaaaccctgcattgagtcccattacaattcaagctttaaggatcctactggggagtaccttgccgactgtggtcgaaaaatctttcaatacccagataagtgcagctgagcttctctcatcagggttattgacaggccagattgtgggattagatttgacctatatgcagatggtcataaaaattgagctgccaactttaactgtacaacctgcaacccagatcatagatctggccaccatttctgcattcattaacaatcaagaagtcatggcccaattaccaacacgtgttatggtgactggcagcttgatccaagcctatcccgcatcgcaatgcaccattacacccaacactgtgtactgtaggtataatgatgcccaagtactctcagatgatactatggcttgcctccaaggtaacttgacaagatgcaccttctctccagtggttgggagctttctcactcgattcgtgctgttcgatggaatagtttatgcaaattgcaggtcgatgttgtgcaagtgcatgcaacctgctgctgtgatcctacagccgagttcatcccctgtaactgtcattgacatgtacaaatgtgtgagtctgcagcttgacaatctcagattcaccatcactcaattggccaatgtaacctacaatagcaccatcaagcttgaatcatcccagatcttgtctattgatccgttggatatatcccaaaatctagctgcggtgaataagagtctaagtgatgcactacaacacttagcacaaagtgacacatatctttctgcaatcacatcagctacgactacaagtgtattatccataatagcaatctgtcttggatcgttaggtttaatattaataatcttgctcagtgtagttgtgtggaagttattgaccattgtcgttgctaatcgaaatagaatggagaattttgtttatcataaataaggatcc

SEQ ID NO: 84 - DNA, 1608 bp, Artificial Sequence
  SV5F G105A mutant (human codon optimized, CpG-free) plus flanking NheI and BamHI restriction sites
gctagctagaccatggggactattattcaatttctggtggtcagctgtctgctggctggggcaggatctctggaccctgctgccctcatgcagattggggtgattcctaccaatgtcaggcagctcatgtattatacagaagcttcttctgcctttattgttgtgaagctgatgcctactatagacagtcccatctctggctgtaacattacttcaataagttcctataatgcaactgtgactaagctgctccagcccataggggaaaatctggaaactataagaaaccagctgattcctacaagaaggagaaggagatttgctgcagttgtgattgggctggctgccctgggtgtggctacagcagcacaagtgacagctgcagtggccctggtcaaagcaaatgagaatgcagctgccatcctgaatctcaagaatgccatccagaagactaatgctgcagttgctgatgtggtgcaagccacacaatctctgggcacagcagtgcaagcagtgcaggatcatatcaactctgttgtgagcccagcaattacagctgccaactgtaaagcacaagatgccatcattggtagcatactcaatctgtatctgactgagctgaccacaatctttcacaaccagattaccaacccagccctgtctccaattaccatccaggccctcaggatactgctgggctctacactgcccactgtggttgaaaagagctttaatacccagatcagtgcagctgagctgctgtcttctggactcctgacagggcagattgttgggctggacctcacctacatgcagatggttatcaagattgaactgcctacactgactgttcagcctgccactcagattattgatctggcaacaatttcagcctttatcaataaccaggaagtgatggctcagctcccaacaagggttatggtgactggcagtctgatacaggcataccctgccagccagtgcaccataacacccaatacagtgtattgcaggtacaatgatgcccaggtgctgtctgatgacacaatggcctgcctgcaggggaatctgactaggtgcacttttagtccagtggtgggcagctttctgactaggtttgtgctgtttgatggcatagtctatgccaactgcaggtccatgctctgcaaatgcatgcagcctgcagcagttattctgcagccaagtagcagtccagtgacagtgatagacatgtataagtgtgtttctctgcaactggacaacctgaggttcaccatcactcagctggcaaatgttacttacaactcaactattaaactggagtcaagtcagattctgagcattgaccctctggatatctcccagaatctggctgcagtgaataagagcctcagtgatgcactccaacatctggcccagtcagacacctatctctcagccattacctctgcaactaccacctcagtcctgagcattatagctatatgtctgggatcactgggcctgattctgatcatactgctgagtgttgtggtgtggaagctgctgacaattgtggtggccaacaggaataggatggaaaattttgtgtaccacaaatagggatcc

SEQ ID NO: 85 - DNA, 1608 bp, Artificial Sequence
  SV5F G109A mutant (human codon optimized, CpG-free) plus flanking NheI and BamHI restriction sites
gctagctagaccatggggactattattcaatttctggtggtcagctgtctgctggctggggcaggatctctggaccctgctgccctcatgcagattggggtgattcctaccaatgtcaggcagctcatgtattatacagaagcttcttctgcctttattgttgtgaagctgatgcctactatagacagtcccatctctggctgtaacattacttcaataagttcctataatgcaactgtgactaagctgctccagcccataggggaaaatctggaaactataagaaaccagctgattcctacaagaaggagaaggagatttgctggagttgtgattgccctggctgccctgggtgtggctacagcagcacaagtgacagctgcagtggccctggtcaaagcaaatgagaatgcagctgccatcctgaatctcaagaatgccatccagaagactaatgctgcagttgctgatgtggtgcaagccacacaatctctgggcacagcagtgcaagcagtgcaggatcatatcaactctgttgtgagcccagcaattacagctgccaactgtaaagcacaagatgccatcattggtagcatactcaatctgtatctgactgagctgaccacaatctttcacaaccagattaccaacccagccctgtctccaattaccatccaggccctcaggatactgctgggctctacactgcccactgtggttgaaaagagctttaatacccagatcagtgcagctgagctgctgtcttctggactcctgacagggcagattgttgggctggacctcacctacatgcagatggttatcaagattgaactgcctacactgactgttcagcctgccactcagattattgatctggcaacaatttcagcctttatcaataaccaggaagtgatggctcagctcccaacaagggttatggtgactggcagtctgatacaggcataccctgccagccagtgcaccataacacccaatacagtgtattgcaggtacaatgatgcccaggtgctgtctgatgacacaatggcctgcctgcaggggaatctgactaggtgcacttttagtccagtggtgggcagctttctgactaggtttgtgctgtttgatggcatagtctatgccaactgcaggtccatgctctgcaaatgcatgcagcctgcagcagttattctgcagccaagtagcagtccagtgacagtgatagacatgtataagtgtgtttctctgcaactggacaacctgaggttcaccatcactcagctggcaaatgttacttacaactcaactattaaactggagtcaagtcagattctgagcattgaccctctggatatctcccagaatctggctgcagtgaataagagcctcagtgatgcactccaacatctggcccagtcagacacctatctctcagccattacctctgcaactaccacctcagtcctgagcattatagctatatgtctgggatcactgggcctgattctgatcatactgctgagtgttgtggtgtggaagctgctgacaattgtggtggccaacaggaataggatggaaaattttgtgtaccacaaatagggatcc

SEQ ID NO: 86 - DNA, 1608 bp, Artificial Sequence
  SV5F G114A mutant (human codon optimized, CpG-free) plus flanking NheI and BamHI restriction sites
gctagctagaccatggggactattattcaatttctggtggtcagctgtctgctggctggggcaggatctctggaccctgctgccctcatgcagattggggtgattcctaccaatgtcaggcagctcatgtattatacagaagcttcttctgcctttattgttgtgaagctgatgcctactatagacagtcccatctctggctgtaacattacttcaataagttcctataatgcaactgtgactaagctgctccagcccataggggaaaatctggaaactataagaaaccagctgattcctacaagaaggagaaggagatttgctggagttgtgattgggctggctgccctggctgtggctacagcagcacaagtgacagctgcagtggccctggtcaaagcaaatgagaatgcagctgccatcctgaatctcaagaatgccatccagaagactaatgctgcagttgctgatgtggtgcaagccacacaatctctgggcacagcagtgcaagcagtgcaggatcatatcaactctgttgtgagcccagcaattacagctgccaactgtaaagcacaagatgccatcattggtagcatactcaatctgtatctgactgagctgaccacaatctttcacaaccagattaccaacccagccctgtctccaattaccatccaggccctcaggatactgctgggctctacactgcccactgtggttgaaaagagctttaatacccagatcagtgcagctgagctgctgtcttctggactcctgacagggcagattgttgggctggacctcacctacatgcagatggttatcaagattgaactgcctacactgactgttcagcctgccactcagattattgatctggcaacaatttcagcctttatcaataaccaggaagtgatggctcagctcccaacaagggttatggtgactggcagtctgatacaggcataccctgccagccagtgcaccataacacccaatacagtgtattgcaggtacaatgatgcccaggtgctgtctgatgacacaatggcctgcctgcaggggaatctgactaggtgcacttttagtccagtggtgggcagctttctgactaggtttgtgctgtttgatggcatagtctatgccaactgcaggtccatgctctgcaaatgcatgcagcctgcagcagttattctgcagccaagtagcagtccagtgacagtgatagacatgtataagtgtgtttctctgcaactggacaacctgaggttcaccatcactcagctggcaaatgttacttacaactcaactattaaactggagtcaagtcagattctgagcattgaccctctggatatctcccagaatctggctgcagtgaataagagcctcagtgatgcactccaacatctggcccagtcagacacctatctctcagccattacctctgcaactaccacctcagtcctgagcattatagctatatgtctgggatcactgggcctgattctgatcatactgctgagtgttgtggtgtggaagctgctgacaattgtggtggccaacaggaataggatggaaaattttgtgtaccacaaatagggatcc

SEQ ID NO: 87 - DNA, 1608 bp, Artificial Sequence
  SV5F G105A/G109A mutant (human codon optimized, CpG-free) plus flanking NheI and BamHI restriction sites
gctagctagaccatggggactattattcaatttctggtggtcagctgtctgctggctggggcaggatctctggaccctgctgccctcatgcagattggggtgattcctaccaatgtcaggcagctcatgtattatacagaagcttcttctgcctttattgttgtgaagctgatgcctactatagacagtcccatctctggctgtaacattacttcaataagttcctataatgcaactgtgactaagctgctccagcccataggggaaaatctggaaactataagaaaccagctgattcctacaagaaggagaaggagatttgctgcagttgtgattgccctggctgccctgggtgtggctacagcagcacaagtgacagctgcagtggccctggtcaaagcaaatgagaatgcagctgccatcctgaatctcaagaatgccatccagaagactaatgctgcagttgctgatgtggtgcaagccacacaatctctgggcacagcagtgcaagcagtgcaggatcatatcaactctgttgtgagcccagcaattacagctgccaactgtaaagcacaagatgccatcattggtagcatactcaatctgtatctgactgagctgaccacaatctttcacaaccagattaccaacccagccctgtctccaattaccatccaggccctcaggatactgctgggctctacactgcccactgtggttgaaaagagctttaatacccagatcagtgcagctgagctgctgtcttctggactcctgacagggcagattgttgggctggacctcacctacatgcagatggttatcaagattgaactgcctacactgactgttcagcctgccactcagattattgatctggcaacaatttcagcctttatcaataaccaggaagtgatggctcagctcccaacaagggttatggtgactggcagtctgatacaggcataccctgccagccagtgcaccataacacccaatacagtgtattgcaggtacaatgatgcccaggtgctgtctgatgacacaatggcctgcctgcaggggaatctgactaggtgcacttttagtccagtggtgggcagctttctgactaggtttgtgctgtttgatggcatagtctatgccaactgcaggtccatgctctgcaaatgcatgcagcctgcagcagttattctgcagccaagtagcagtccagtgacagtgatagacatgtataagtgtgtttctctgcaactggacaacctgaggttcaccatcactcagctggcaaatgttacttacaactcaactattaaactggagtcaagtcagattctgagcattgaccctctggatatctcccagaatctggctgcagtgaataagagcctcagtgatgcactccaacatctggcccagtcagacacctatctctcagccattacctctgcaactaccacctcagtcctgagcattatagctatatgtctgggatcactgggcctgattctgatcatactgctgagtgttgtggtgtggaagctgctgacaattgtggtggccaacaggaataggatggaaaattttgtgtaccacaaatagggatcc

SEQ ID NO: 88 - DNA, 1608 bp, Artificial Sequence
  SV5F G105A/G114A mutant (human codon optimized, CpG-free) plus flanking NheI and BamHI restriction sites
gctagctagaccatggggactattattcaatttctggtggtcagctgtctgctggctggggcaggatctctggaccctgctgccctcatgcagattggggtgattcctaccaatgtcaggcagctcatgtattatacagaagcttcttctgcctttattgttgtgaagctgatgcctactatagacagtcccatctctggctgtaacattacttcaataagttcctataatgcaactgtgactaagctgctccagcccataggggaaaatctggaaactataagaaaccagctgattcctacaagaaggagaaggagatttgctgcagttgtgattgggctggctgccctggctgtggctacagcagcacaagtgacagctgcagtggccctggtcaaagcaaatgagaatgcagctgccatcctgaatctcaagaatgccatccagaagactaatgctgcagttgctgatgtggtgcaagccacacaatctctgggcacagcagtgcaagcagtgcaggatcatatcaactctgttgtgagcccagcaattacagctgccaactgtaaagcacaagatgccatcattggtagcatactcaatctgtatctgactgagctgaccacaatctttcacaaccagattaccaacccagccctgtctccaattaccatccaggccctcaggatactgctgggctctacactgcccactgtggttgaaaagagctttaatacccagatcagtgcagctgagctgctgtcttctggactcctgacagggcagattgttgggctggacctcacctacatgcagatggttatcaagattgaactgcctacactgactgttcagcctgccactcagattattgatctggcaacaatttcagcctttatcaataaccaggaagtgatggctcagctcccaacaagggttatggtgactggcagtctgatacaggcataccctgccagccagtgcaccataacacccaatacagtgtattgcaggtacaatgatgcccaggtgctgtctgatgacacaatggcctgcctgcaggggaatctgactaggtgcacttttagtccagtggtgggcagctttctgactaggtttgtgctgtttgatggcatagtctatgccaactgcaggtccatgctctgcaaatgcatgcagcctgcagcagttattctgcagccaagtagcagtccagtgacagtgatagacatgtataagtgtgtttctctgcaactggacaacctgaggttcaccatcactcagctggcaaatgttacttacaactcaactattaaactggagtcaagtcagattctgagcattgaccctctggatatctcccagaatctggctgcagtgaataagagcctcagtgatgcactccaacatctggcccagtcagacacctatctctcagccattacctctgcaactaccacctcagtcctgagcattatagctatatgtctgggatcactgggcctgattctgatcatactgctgagtgttgtggtgtggaagctgctgacaattgtggtggccaacaggaataggatggaaaattttgtgtaccacaaatagggatcc

SEQ ID NO: 89 - DNA, 1608 bp, Artificial Sequence
  SV5F G109A/G114A mutant (human codon optimized, CpG-free) plus flanking NheI and BamHI restriction sites
gctagctagaccatggggactattattcaatttctggtggtcagctgtctgctggctggggcaggatctctggaccctgctgccctcatgcagattggggtgattcctaccaatgtcaggcagctcatgtattatacagaagcttcttctgcctttattgttgtgaagctgatgcctactatagacagtcccatctctggctgtaacattacttcaataagttcctataatgcaactgtgactaagctgctccagcccataggggaaaatctggaaactataagaaaccagctgattcctacaagaaggagaaggagatttgctggagttgtgattgccctggctgccctggctgtggctacagcagcacaagtgacagctgcagtggccctggtcaaagcaaatgagaatgcagctgccatcctgaatctcaagaatgccatccagaagactaatgctgcagttgctgatgtggtgcaagccacacaatctctgggcacagcagtgcaagcagtgcaggatcatatcaactctgttgtgagcccagcaattacagctgccaactgtaaagcacaagatgccatcattggtagcatactcaatctgtatctgactgagctgaccacaatctttcacaaccagattaccaacccagccctgtctccaattaccatccaggccctcaggatactgctgggctctacactgcccactgtggttgaaaagagctttaatacccagatcagtgcagctgagctgctgtcttctggactcctgacagggcagattgttgggctggacctcacctacatgcagatggttatcaagattgaactgcctacactgactgttcagcctgccactcagattattgatctggcaacaatttcagcctttatcaataaccaggaagtgatggctcagctcccaacaagggttatggtgactggcagtctgatacaggcataccctgccagccagtgcaccataacacccaatacagtgtattgcaggtacaatgatgcccaggtgctgtctgatgacacaatggcctgcctgcaggggaatctgactaggtgcacttttagtccagtggtgggcagctttctgactaggtttgtgctgtttgatggcatagtctatgccaactgcaggtccatgctctgcaaatgcatgcagcctgcagcagttattctgcagccaagtagcagtccagtgacagtgatagacatgtataagtgtgtttctctgcaactggacaacctgaggttcaccatcactcagctggcaaatgttacttacaactcaactattaaactggagtcaagtcagattctgagcattgaccctctggatatctcccagaatctggctgcagtgaataagagcctcagtgatgcactccaacatctggcccagtcagacacctatctctcagccattacctctgcaactaccacctcagtcctgagcattatagctatatgtctgggatcactgggcctgattctgatcatactgctgagtgttgtggtgtggaagctgctgacaattgtggtggccaacaggaataggatggaaaattttgtgtaccacaaatagggatcc

SEQ ID NO: 90 - DNA, 1608 bp, Artificial Sequence
  SV5F G105A/G109A/G114A mutant (human codon optimized, CpG-free) plus flanking NheI and BamHI restriction sites
gctagctagaccatggggactattattcaatttctggtggtcagctgtctgctggctggggcaggatctctggaccctgctgccctcatgcagattggggtgattcctaccaatgtcaggcagctcatgtattatacagaagcttcttctgcctttattgttgtgaagctgatgcctactatagacagtcccatctctggctgtaacattacttcaataagttcctataatgcaactgtgactaagctgctccagcccataggggaaaatctggaaactataagaaaccagctgattcctacaagaaggagaaggagatttgctgcagttgtgattgccctggctgccctggctgtggctacagcagcacaagtgacagctgcagtggccctggtcaaagcaaatgagaatgcagctgccatcctgaatctcaagaatgccatccagaagactaatgctgcagttgctgatgtggtgcaagccacacaatctctgggcacagcagtgcaagcagtgcaggatcatatcaactctgttgtgagcccagcaattacagctgccaactgtaaagcacaagatgccatcattggtagcatactcaatctgtatctgactgagctgaccacaatctttcacaaccagattaccaacccagccctgtctccaattaccatccaggccctcaggatactgctgggctctacactgcccactgtggttgaaaagagctttaatacccagatcagtgcagctgagctgctgtcttctggactcctgacagggcagattgttgggctggacctcacctacatgcagatggttatcaagattgaactgcctacactgactgttcagcctgccactcagattattgatctggcaacaatttcagcctttatcaataaccaggaagtgatggctcagctcccaacaagggttatggtgactggcagtctgatacaggcataccctgccagccagtgcaccataacacccaatacagtgtattgcaggtacaatgatgcccaggtgctgtctgatgacacaatggcctgcctgcaggggaatctgactaggtgcacttttagtccagtggtgggcagctttctgactaggtttgtgctgtttgatggcatagtctatgccaactgcaggtccatgctctgcaaatgcatgcagcctgcagcagttattctgcagccaagtagcagtccagtgacagtgatagacatgtataagtgtgtttctctgcaactggacaacctgaggttcaccatcactcagctggcaaatgttacttacaactcaactattaaactggagtcaagtcagattctgagcattgaccctctggatatctcccagaatctggctgcagtgaataagagcctcagtgatgcactccaacatctggcccagtcagacacctatctctcagccattacctctgcaactaccacctcagtcctgagcattatagctatatgtctgggatcactgggcctgattctgatcatactgctgagtgttgtggtgtggaagctgctgacaattgtggtggccaacaggaataggatggaaaattttgtgtaccacaaatagggatcc

SEQ ID NO: 91 - DNA, 1728 bp, Artificial Sequence
  Chicken LV Envelope Protein (unmodified) plus flanking NheI and BamHI restriction sites
gctagctagaccatggaccaagtcattaaggaaatgttcctgggcagaccgaaaacggactcgggagaaaaaccccagcagcccgcaggcggcaagaaaaggaagcagaaggacactcatccattgctgccatcgagaggttacttcttctttcaaatgatacttgtgtgcgtggttattatttccgttgtcccaggggtggggggagttcatctgttgcaacaaccaggaaacgtgtgggtcacctgggcaaataagacgggccgaacagatttttgccttagtctacagtcagcgacctcaccattccgcacctgcttgataggcattccacagtatcctctgaacaccttcaagggatacgtcactaatgttactgcttgcgataacgacgccgatttagccagccaaacagcatgcttgataaaggctctaaatacaaccctcccttgggacccccaagaattggatattttagggtcccagatgatcaagaacggaacaacacgtacgtgtgttacctttggttcggtgtgctataaagagaacaatcgcagtagagtctgtcacaattttgatgggaattttaatgggactggtggggcagaagcagaattgcgtgacttcatagcaaaatggaaaagtgatgaccttcttataaggccctatgtcaaccaatcatggacgatggtaagtccaataaacgtagagagtttttcaataagtcgtagatattgtggattcaccagtaacgagactcgttactatagaggggacctttctaattggtgtggttcaaaaaggggaaaatggtcagcggggtacagcaacaggacaaaatgttccagcaacacgacgggttgcggtggtaattgcacgacggaatggaattattatgcatatgggtttaccttcgggaaacagccagaggtgttgtggaacaatgggactgctaaggcactccccccaggtattttcttgatttgtggggacagggcttggcaaggcatcccgcgtaatgccttgggagggccctgttatctaggacaattgactatgctctctcctaactttaccacctggataacatatgggccgaacattacgggtcaccgccgtagcaggcgctcgctgagtcgtctctcgcctgactgcggtgatgagctacagctatggagtgtgacagcccggatatttgcttctttctttgctcctggtatagcagcagcacaggccttaaaggagatcgaacgattggcatgttggtcggttaagcaagcgaatttaacatcattaatattgaatgcgatgctggaggatacgagcagcatccggcacgcagtgttgcagaatcgagcagccatcgatttcttactcctggcgcagggacacgggtgtcaagacgtggaagggatgtgttgcttcaatctcagcgatcatagtgagtccattcacaaggcgctccaagccatgaaggaacatacagagaagatacgggtggaagatgatcccataggggactggtttacgcgcacgtttggtgatctaggaaggtggctcgcgaaaggtgttaagacgctactgtttgccttgcttgtcatagcctgtctattagctatcattccatgtttaatcaagtgctttcaggattgtctattgagaacaatgaatcagtttatggatgaacgcataaaatatcatagaattagggagcagctgtagggatcc

SEQ ID NO: 92 - DNA, 1674 bp, Artificial Sequence
  SER F Protein, wt (unmodified) plus flanking NheI and BamHI restriction sites
gctagctagaccatgggtactataattcaatttctggtggtctcctgtctattggcaggagcaggcagccttgatccagcagccctcatgcaaatcggtgtcattccaacaaatgtccggcaacttatgtattatactgaggcctcatcagcattcattgttgtgaagttaatgcctacaattgactcgccgattagtggatgtaatataacatcaatttcaagctataatgcaacagtgacaaaactcctacagccgatcggtgagaatttggaaacgattaggaaccagttgattccaactcggaggagacgccggtttgcaggggtggtgattggattagctgcattaggagtagctactgccgcacaggtcactgccgcagtagcactagtaaaggcaaataaaaatgctgcggctatactcaatctcaaaaatgcaatccaaaaaacaaatacagcagttgcagatgtggtccaggccacacaatcactaggaacggcagttcaagcagttcaagatcacataaacagtgtggtaagtccagcaattacagcagccaattgtaaggcccaagatgctatcattggctcaatcctcaatctctatttgaccgagttgacaactatcttccacaatcaaattacaaaccctgcattgagtcctattacaattcaagctttaagaatcctactggggagtaccttgccgactgtggtcgaaaaatctttcaatacccagataagtgcagctgagcttctctcatcagggttattgacaggccagattgtgggattagatttgacctatatgcagatggtcataaaaattgagctgccaactttaactgtacaacctgcaacccagatcattgatctggccaccatttctgcattcattaacaatcaagaagtcatggcccaattaccaacacgtgttattgtgactggcagcttgatccaagcctatcccgcatcgcaatgcactattacacccaacactgtgtactgtaggtataatgatgcccaagtactctcagatgatacgatggcttgcctccaaggtaacttgacaagatgcaccttctctccggtggttgggagctttctcactcgattcatgctgttcgatggaatagtttatgcaaattgcaggtcgatgttatgcaagtgcatgcagcctgctgctgtgatcctacagccgagttcatcccctgtaactgtcattgacatgtacaaatgtgtgagtctgcagcttgacaatctcagattcaccatcactcaattggccaatgtaacctacaatagcaccatcaagcttgaaacatcccaaatcttgcctattgatccgttggatatatcccagaatctagctgcggtgaataagagtctaagtgatgcactacaacacttagcacaaagtgacacatacctttctgcaatcacatcagctacgactacaagtgtattatccataatggcaatctgtcttggatcgttaggtttaatcttaataatcttgctcagtgtagttgtgtggaagttattgaccattgtcactgctaatcgaaatagaatggagaattttgtttatcataattcagcattccaccactcacgatctgatctcagtgagaaaaatcaacctgcaactcttggaacaagataaggatcc

SEQ ID NO: 93 - DNA, 1659 bp, Artificial Sequence
  PPRV-F Protein (unmodified) plus flanking NheI and BamHI restriction sites
gctagctagaccatgacacgggtcgcaatcttgacatttctgtttcttttcccaaatgctgttgcgtgccagattcactggggcaatctatccaagatcgggattgtaggaacagggagtgccagctacaaggtgatgactaggccaagccaccaaactctggttataaagttaatgccaaatataacagccatcgacaattgtacaaagtcagagattgcagagtacaagagattgctgatcacagtgttaaagcctgtagaggatgctctgtcagtgataaccaagaatgtaagaccaattcaaactctgacacctgggcgtagaactcgccgctttgctggagctgttctggccggagtagcacttggagttgcgacagccgctcagataactgcaggagtcgcccttcatcaatcattgatgaactcccaagcaattgagagtttaaaaaccagtcttgagaagtcgaatcaggcaatagaggaaatcagacttgcaaataaggagaccatactagcagtacagggcgtccaggattatatcaacaatgagcttgtcccttctgtccatagaatgtcatgcgagctggtaggtcacaagctcggcctcaagctccttaggtactacaccgagatcctgtccatattcgggcccagccttcgagacccgatagctgccgaaatatcaatccaggcactcagttatgcattaggcggggacattaatagaatcctggacaagcttgggtatagcggtggggatttccttgccatcctagaaagcaagggaataaaggcccgggtaacatatgtggatacaagagattactttataattcttagcatcgcctacccaaccttatctgagatcaagggagtgatagttcacaagatagaagctataacatacaacattggggcacaggagtggtatactactatccctaaatatgtagccactcaggggtatctgatatcgaactttgatgagacgtcatgcgtattcactccggatgggacagtttgcagccagaatgcgttgtacccaatgagcccattgctccaggaatgtttccaggggtcaacaaaatcgtgcgccagaaccctagtttcagggaccataagtaatagatttatcctatcaaaagggaacctgattgcaaattgtgcgtcagttctgtgcaaatgctacacaacagagacagtcattagccaagatcccgacaaactactaactgttgtagcatccgacaagtgtcctgtagttgaggtggatggagtgacaatacaggtcggcagtcgagagtatccggattctgtatacctacacaaaatagacttaggtccagccatctccctagaaaaactggatgtaggcaccaatttaggcaatgcagtcacaagactggagaatgcaaaggagctcctagatgcatcagaccaaatactgaagactgttaaaggggtacctttcggtgggaatatgtacatagcactggcagcttgcattggggtatccctagggcttgtcacattaatatgctgctgcaaggggaggtgtaagaacaaggaagttcccatctccaaaatcaacccagggctcaaacccgacctgaccgggacctcaaagtcgtacgtgagatcactgtagggatcc

SEQ ID NO: 94 - DNA, 1659 bp, Artificial Sequence
  PPRV-F Protein (silent mutation to remove internal AseI restriction site) plus flanking NheI and BamHI restriction sites
gctagctagaccatgacacgggtcgcaatcttgacatttctgtttcttttcccaaatgctgttgcgtgccagattcactggggcaatctatccaagatcgggattgtaggaacagggagtgccagctacaaggtgatgactaggccaagccaccaaactctggttataaagttaatgccaaatataacagccatcgacaattgtacaaagtcagagattgcagagtacaagagattgctgatcacagtgttaaagcctgtagaggatgctctgtcagtgataaccaagaatgtaagaccaattcaaactctgacacctgggcgtagaactcgccgctttgctggagctgttctggccggagtagcacttggagttgcgacagccgctcagataactgcaggagtcgcccttcatcaatcattgatgaactcccaagcaattgagagtttaaaaaccagtcttgagaagtcgaatcaggcaatagaggaaatcagacttgcaaataaggagaccatactagcagtacagggcgtccaggattatatcaacaatgagcttgtcccttctgtccatagaatgtcatgcgagctggtaggtcacaagctcggcctcaagctccttaggtactacaccgagatcctgtccatattcgggcccagccttcgagacccgatagctgccgaaatatcaatccaggcactcagttatgcattaggcggggacataaatagaatcctggacaagcttgggtatagcggtggggatttccttgccatcctagaaagcaagggaataaaggcccgggtaacatatgtggatacaagagattactttataattcttagcatcgcctacccaaccttatctgagatcaagggagtgatagttcacaagatagaagctataacatacaacattggggcacaggagtggtatactactatccctaaatatgtagccactcaggggtatctgatatcgaactttgatgagacgtcatgcgtattcactccggatgggacagtttgcagccagaatgcgttgtacccaatgagcccattgctccaggaatgtttccaggggtcaacaaaatcgtgcgccagaaccctagtttcagggaccataagtaatagatttatcctatcaaaagggaacctgattgcaaattgtgcgtcagttctgtgcaaatgctacacaacagagacagtcattagccaagatcccgacaaactactaactgttgtagcatccgacaagtgtcctgtagttgaggtggatggagtgacaatacaggtcggcagtcgagagtatccggattctgtatacctacacaaaatagacttaggtccagccatctccctagaaaaactggatgtaggcaccaatttaggcaatgcagtcacaagactggagaatgcaaaggagctcctagatgcatcagaccaaatactgaagactgttaaaggggtacctttcggtgggaatatgtacatagcactggcagcttgcattggggtatccctagggcttgtcaccttaatatgctgctgcaaggggaggtgtaagaacaaggaagttcccatctccaaaatcaacccagggctcaaacccgacctgaccgggacctcaaagtcgtacgtgagatcactgtagggatcc

SEQ ID NO: 95 - DNA, 699 bp, Artificial Sequence
  Rat Tetraspanin CD9 (unmodified) plus flanking NheI and BamHI restriction sites
gctagctagaccatgccggtcaaaggaggtagcaagtgcatcaaatacctgctctttggatttaacttcatcttctggctcgccggcatcgcagtgcttgccattggactatggctgcggttcgactctcagaccaagagcatcttcgagcaagaaactaatcattccagcttctacacaggagtgtacattctgattggagctggggccctcatgatgctagttggtttcctgggctgctgtggagctgtacaagagtcacagtgcatgctgggattgttcttcggattcctcttggtgatattcgccattgagatcgccgcagccgtctggggctatacccacaaggacgaggtgattaaagaactccaggagttttacaaggacacctaccaaaagttaaggaacaaggatgagccccagcgggaaacactcaaagccatccatatggcgttgaactgctgtggcatagctggtggtgtggagcagtttatctcggacatctgccccaaaaagcaggttctggaatccttccaggttaagtcctgcccggatgccatcgatgaggtcttccacagcaagttccacatcattggagcagtgggcatcggtatcgccgtggtgatgatcttcggtatgattttcagcatgattctgtgctgcgccatccgcaggagccgagaaatggtctagggatcc

SEQ ID NO: 96 - DNA, 1635 bp, Artificial Sequence
  Syncytin 1 precursor (unmodified) plus flanking NheI and BamHI restriction sites
gctagctagaccatggccctcccttatcatatttttctctttactgttcttttaccctctttcactctcactgcaccccctccatgccgctgtatgaccagtagctccccttaccaagagtttctatggagaatgcagcgtcccggaaatattgatgccccatcgtataggagtctttctaagggaacccccaccttcactgcccacacccatatgccccgcaactgctatcactctgccactctttgcatgcatgcaaatactcattattggacaggaaaaatgattaatcctagttgtcctggaggacttggagtcactgtctgttggacttacttcacccaaactggtatgtctgatgggggtggagttcaagatcaggcaagagaaaaacatgtaaaagaagtaatctcccaactcacccgggtacatggcacctctagcccctacaaaggactagatctctcaaaactacatgaaaccctccgtacccatactcgcctggtaagcctatttaataccaccctcactgggctccatgaggtctcggcccaaaaccctactaactgttggatatgcctccccctgaacttcaggccatatgtttcaatccctgtacctgaacaatggaacaacttcagcacagaaataaacaccacttccgttttagtaggacctcttgtttccaatctggaaataacccatacctcaaacctcacctgtgtaaaatttagcaatactacatacacaaccaactcccaatgcatcaggtgggtaactcctcccacacaaatagtctgcctaccctcaggaatattttttgtctgtggtacctcagcctatcgttgtttgaatggctcttcagaatctatgtgcttcctctcattcttagtgccccctatgaccatctacactgaacaagatttatacagttatgtcatatctaagccccgcaacaaaagagtacccattcttccttttgttataggagcaggagtgctaggtgcactaggtactggcattggcggtatcacaacctctactcagttctactacaaactatctcaagaactaaatggggacatggaacgggtcgccgactccctggtcaccttgcaagatcaacttaactccctagcagcagtagtccttcaaaatcgaagagctttagacttgctaaccgctgaaagagggggaacctgtttatttttaggggaagaatgctgttattatgttaatcaatccggaatcgtcactgagaaagttaaagaaattcgagatcgaatacaacgtagagcagaggagcttcgaaacactggaccctggggcctcctcagccaatggatgccctggattctccccttcttaggacctctagcagctataatattgctactcctctttggaccctgtatctttaacctccttgttaactttgtctcttccagaatcgaagctgtaaaactacaaatggagcccaagatgcagtccaagactaagatctaccgcagacccctggaccggcctgctagcccacgatctgatgttaatgacatcaaaggcacccctcctgaggaaatctcagctgcacaacctctactacgccccaattcagcaggaagcagttagggatcc

SEQ ID NO: 97 - DNA, 1635 bp, Artificial Sequence
  Syncytin 1 precursor (silent mutantions to remove internal AseI and NheI restriction sites) plus flanking NheI and BamHI restriction sites
gctagctagaccatggccctcccttatcatatttttctctttactgttcttttaccctctttcactctcactgcaccccctccatgccgctgtatgaccagtagctccccttaccaagagtttctatggagaatgcagcgtcccggaaatattgatgccccatcgtataggagtctttctaagggaacccccaccttcactgcccacacccatatgccccgcaactgctatcactctgccactctttgcatgcatgcaaatactcattattggacaggaaaaatgataaatcctagttgtcctggaggacttggagtcactgtctgttggacttacttcacccaaactggtatgtctgatgggggtggagttcaagatcaggcaagagaaaaacatgtaaaagaagtaatctcccaactcacccgggtacatggcacctctagcccctacaaaggactagatctctcaaaactacatgaaaccctccgtacccatactcgcctggtaagcctatttaataccaccctcactgggctccatgaggtctcggcccaaaaccctactaactgttggatatgcctccccctgaacttcaggccatatgtttcaatccctgtacctgaacaatggaacaacttcagcacagaaataaacaccacttccgttttagtaggacctcttgtttccaatctggaaataacccatacctcaaacctcacctgtgtaaaatttagcaatactacatacacaaccaactcccaatgcatcaggtgggtaactcctcccacacaaatagtctgcctaccctcaggaatattttttgtctgtggtacctcagcctatcgttgtttgaatggctcttcagaatctatgtgcttcctctcattcttagtgccccctatgaccatctacactgaacaagatttatacagttatgtcatatctaagccccgcaacaaaagagtacccattcttccttttgttataggagcaggagtgctaggtgcactaggtactggcattggcggtatcacaacctctactcagttctactacaaactatctcaagaactaaatggggacatggaacgggtcgccgactccctggtcaccttgcaagatcaacttaactccctagcagcagtagtccttcaaaatcgaagagctttagacttgctaaccgctgaaagagggggaacctgtttatttttaggggaagaatgctgttattatgttaatcaatccggaatcgtcactgagaaagttaaagaaattcgagatcgaatacaacgtagagcagaggagcttcgaaacactggaccctggggcctcctcagccaatggatgccctggattctccccttcttaggacctctagcagctataatattgctactcctctttggaccctgtatctttaacctccttgttaactttgtctcttccagaatcgaagctgtaaaactacaaatggagcccaagatgcagtccaagactaagatctaccgcagacccctggaccggcctgcaagcccacgatctgatgttaatgacatcaaaggcacccctcctgaggaaatctcagctgcacaacctctactacgccccaattcagcaggaagcagttagggatcc

SEQ ID NO: 98 - DNA, 1635 bp, Artificial Sequence
  Syncytin 2 (HERV-FRD NM_207582; unmodified) plus flanking NheI and BamHI restriction sites
gctagctagaccatgggcctgctcctgctggttctcattctcacgccttcactagcagcctaccgccatcctgatttcccgttattggaaaaagctcagcaactgctccaaagtacaggatccccttactccaccaattgctggttatgtactagctcttccactgaaacaccagggacagcttatccagcctcgcccagagaatggacaagcatagaggcggaattacatatttcctatcgatgggaccctaatctgaaaggactgatgaggcctgcaaatagtcttctttcaacagtaaagcaagatttccctgatatccgccagaaacctcccattttcggacccatctttactaatatcaacctaatgggaatagcccctatttgtgttatggccaaaaggaaaaatggaacaaatgtaggcactcttccaagtacagtctgtaatgttactttcactgtagattctaaccaacagacttaccaaacatacacccacaaccaattccgccatcaaccaagattccccaaacctccaaatattacttttcctcagggaactttgctagataaatccagccggttttgccagggacgcccaagctcatgcagtactcgaaacttctggttccggcctgctgattataaccaatgtctgcaaatttccaacctcagctctacagcggaatgggttctattggaccaaactcgaaattctcttttttgggaaaataaaaccaagggagctaaccagagccaaacaccctgcgtccaagtcttagcaggcatgactatagccaccagctacctgggcatatcagcagtctcagaattttttggaacctccctcacccccttatttcatttccatatctctacatgccttaaaactcaaggagccttttatatttgtggccagtcgattcaccaatgcctccccagtaactggactggaacttgtaccataggctatgtaaccccagacatcttcatagcccctggcaatctctctcttccaataccaatctatgggaattccccgttgcccagggtgaggagggcaatccatttcattccccttctcgcgggactcggcattctagctggtacgggaaccggaattgctggaatcacaaaagcttccctcacctatagccagctctcaaaggaaatagccaacaacattgacaccatggctaaagccttaacgaccatgcaagaacaaatcgactctttagcagccgtagtccttcaaaatcgtcgaggactagacatgttaacggcagcacagggaggaatttgtttggccttagatgaaaaatgttgcttttgggtaaatcaatcaggaaaagtacaagacaacatcagacaactcctaaatcaagcctccagtttacgggaacgagccactcagggttggttaaattgggaaggaacttggaaatggttctcttgggttcttccccttacaggcccacttgttagtctcctacttttgctcctttttggtccatgtctcctaaatctaataacccaatttgtctcctctcgccttcaggccataaagctccagacgaatctcagtgcaggacgccatcctcgcaatattcaagagtcacccttctaaggatcc

SEQ ID NO: 99 - DNA, 1635 bp, Artificial Sequence
  Syncytin 2 (HERV-FRD; silent mutations to remove internal BamHI and EcoRI restrictions sites) plus flanking NheI and BamHI restriction sites
gctagctagaccatgggcctgctcctgctggttctcattctcacgccttcactagcagcctaccgccatcctgatttcccgttattggaaaaagctcagcaactgctccaaagtacaggctccccttactccaccaattgctggttatgtactagctcttccactgaaacaccagggacagcttatccagcctcgcccagagaatggacaagcatagaggcggaattacatatttcctatcgatgggaccctaatctgaaaggactgatgaggcctgcaaatagtcttctttcaacagtaaagcaagatttccctgatatccgccagaaacctcccattttcggacccatctttactaatatcaacctaatgggaatagcccctatttgtgttatggccaaaaggaaaaatggaacaaatgtaggcactcttccaagtacagtctgtaatgttactttcactgtagattctaaccaacagacttaccaaacatacacccacaaccaattccgccatcaaccaagattccccaaacctccaaatattacttttcctcagggaactttgctagataaatccagccggttttgccagggacgcccaagctcatgcagtactcgaaacttctggttccggcctgctgattataaccaatgtctgcaaatttccaacctcagctctacagcggaatgggttctattggaccaaactcgaaattctcttttttgggaaaataaaaccaagggagctaaccagagccaaacaccctgcgtccaagtcttagcaggcatgactatagccactagctacctgggcatatcagcagtctcagaattttttggaacctccctcacccccttatttcatttccatatctctacatgccttaaaactcaaggagccttttatatttgtggccagtcgattcaccaatgcctccccagtaactggactggaacttgtaccataggctatgtaaccccagacatcttcatagcccctggcaatctctctcttccaataccaatctatggaaattccccgttgcccagggtgaggagggcaatccatttcattccccttctcgcgggactcggcattctagctggtacgggaaccggaattgctggaatcacaaaagcttccctcacctatagccagctctcaaaggaaatagccaacaacattgacaccatggctaaagccttaacgaccatgcaagaacaaatcgactctttagcagccgtagtccttcaaaatcgtcgaggactagacatgttaacggcagcacagggaggaatttgtttggccttagatgaaaaatgttgcttttgggtaaatcaatcaggaaaagtacaagacaacatcagacaactcctaaatcaagcctccagtttacgggaacgagccactcagggttggttaaattgggaaggaacttggaaatggttctcttgggttcttccccttacaggcccacttgttagtctcctacttttgctcctttttggtccatgtctcctaaatctaataacccaatttgtctcctctcgccttcaggccataaagctccagacgaatctcagtgcaggacgccatcctcgcaatattcaagagtcacccttctaaggatcc

SEQ ID NO: 100 - DNA, 1833 bp, Artificial Sequence
  HERV3 cDNA WT (unmodified) plus flanking NheI and BamHI restriction sites
gctagctagaccatgctgggtatgaacatgctactcatcactttgttcttgctactccccttatccatgttaaaaggagaaccctgggagggatgcctccactgcacccacactacgtggtcggggaacatcatgactaaaaccctgttgtatcacacttattatgagtgtgctgggacctgcctaggaacttgtactcacaaccagacaacctactcagtctgtgacccaggaaggggccagccttatgtgtgttatgaccctaagtcttcacctgggacctggtttgaaattcatgtcgggtcaaaggaaggggatcttctaaaccaaaccaaggtatttccctctggcaaggatgtcgtatccttatactttgatgtttgccagatagtatccatgggctcactctttcccgtaatcttcagttccatggagtactatagtagctgccataaaaataggtatgcacaccctgcttgttccaccgattccccagtaacaacttgctgggactgcacaacgtggtccactaaccaacaatcactagggccaattatgcttaccaaaataccattagaaccagattgtaaaacaagcacttgcaattctgtaaatcttaccatcttagagccagatcagcccatatggacaacaggtttaaaagcaccgctaggggcacgagtcagcggtgaagaaattggcccaggagcctatgtctatctatatatcataaagaaaactcggacccgctcaacccaacagttccgagtttttgagtcattctatgagcatgttaaccagaaattgcctgagccccctcccttggccagtaatttattcgcccaactggctgaaaacatagccagcagcctgcacgttgcttcatgttatgtctgtgggggaatgaacatgggagaccaatggccatgggaagcaagggaactaatgccccaagataatttcacactaaccgcctcttccctcgaacctgcaccatcaagtcagagcatctggttcttaaaaacctccattattggaaaattctgtattgctcgctggggaaaggcctttacagacccagtaggagagttaacttgcctaggacaacaatattacaacgagacactaggaaagactttatggaggggcaaaagcaataattctgaatcaccacacccaagcccattctctcgtttcccatctttaaaccattcttggtaccaacttgaagctccaaatacctggcaggcaccctctggcctctactggatctgtgggccacaagcatatcgacaactgccagctaaatggtcaggggcctgtgtactggggacaattaggccgtccttcttcctaatgcccctaaaacagggagaagccttaggataccccatctatgatgaaactaaaaggaaaagcaaaagaggcataactataggagattggaaggacaatgaatggcctcctgaaagaataattcaatattatggcccagccacctgggcagaagatggaatgtggggataccgcaccccagtttacatgcttaaccgcattataagattgcaggcagtactagaaatcattaccaatgaaactgcaggggccttgaatctgcttgcccagcaagccacaaaaatgagaaatgtcatttatcaaaatagactggccttagactacctcctagcccaggaagagggagtatgcggaaagttcaaccttactaactgctgcctggaacttgatgacgaaggaaaggtcatcaaagaaataactgctaaaatccaaaagttagctcacatcccagttcagacttggaaaggatagggatcc

SEQ ID NO: 101 - DNA, 1833 bp, Artificial Sequence
  HERV3 cDNA WT (human codon optimized, CpG-free) plus flanking NheI and BamHI restriction sites
gctagctagaccatgctgggtatgaacatgctactcatcactttgttcttgctactccccttatccatgttaaaaggagaaccctgggagggatgcctccactgcacccacactacgtggtcggggaacatcatgactaaaaccctgttgtatcacacttattatgagtgtgctgggacctgcctaggaacttgtactcacaaccagacaacctactcagtctgtgacccaggaaggggccagccttatgtgtgttatgaccctaagtcttcacctgggacatggtttgaaattcatgtcgggtcaaaggaaggggatcttctaaaccaaaccaaggtatttccctctggcaaggatgtcgtatccttatactttgatgtttgccagatagtatccatgggctcactctttcccgtaatcttcagttccatggagtactatagtagctgccataaaaataggtatgcacaccctgcttgttccaccgattccccagtaacaacttgctgggactgcacaacgtggtccactaaccaacaatcactagggccaattatgcttaccaaaataccattagaaccagattgtaaaacaagcacttgcaattctgtaaatcttaccatcttagagccagatcagcccatatggacaacaggtttaaaagcaccgctaggggcacgagtcagcggtgaagaaattggcccaggagcctatgtctatctatatatcataaagaaaactcggacccgctcaacccaacagttccgagtttttgagtcattctatgagcatgttaaccagaaattgcctgagccccctcccttggccagtaatttattcgcccaactggctgaaaacatagccagcagcctgcacgttgcttcatgttatgtctgtgggggaatgaacatgggagaccaatggccatgggaagcaagggaactaatgccccaagataatttcacactaaccgcctcttccctcgaacctgcaccatcaagtcagagcatctggttcttaaaaacctccattattggaaaattctgtattgctcgctggggaaaggcctttacagacccagtaggagagttaacttgcctaggacaacaatattacaacgagacactaggaaagactttatggaggggcaaaagcaataattctgaatcaccacacccaagcccattctctcgtttcccatctttaaaccattcttggtaccaacttgaagctcccaatacctggcaggcaccctctggcctctactggatctgtgggccacaagcatatcgacaactgcccgctaaatggtcaggggcctgtgtactggggacaattaggccgtccttcttcctaatgcccctaaaacagggagaagccttaggataccccatctatgatgaaactaaaaggaaaagcaaaagaggcataactataggagattggaaggacaatgaatggcctcctgaaagaataattcaatattatggccccgccacctgggcagaagatggaatgtggggataccgcaccccagtttacatgcttaaccgcattataagattgcaggcagtactagaaatcattaccaatgaaactgcaggggccttgaatctgcttgcccagcaagccacaaaaatgagaaatgtcatttatcaaaatagactggccttagactacctcctagcccaggaagagggagtatgcggaaagttcaaccttactaactgctgcctggaacttgatgacgaaggaaaggtcatcaaagaaataactgctaaaatccaaaagttagctcacatcccagttcagacttggaaaggatagggatcc

SEQ ID NO: 102 - DNA, 192 bp, Artificial Sequence
  CPLV IRES (CpG-free)
tgactatgtgatcttattaaaattaggttaaatttgcaggttaaaaatagttttaatattgctatagtcttagacctcttgtatatttatacttaccacacaagatggagggcagcagccctgcaatatctagtgtaccctgctgctggctcaaacattaagtggtgttgtgccaaaagaatctcacttcaa

SEQ ID NO: 103 - DNA, 192 bp, Artificial Sequence
  CPLV IRES WT
tgactatgtgatcttattaaaattaggttaaatttcgaggttaaaaatagttttaatattgctatagtcttagaggtcttgtatatttatacttaccacacaagatggaccggagcagccctccaatatctagtgtaccctcgtgctcgctcaaacattaagtggtgttgtgcgaaaagaatctcacttcaa

SEQ ID NO: 104 - DNA, 585 bp, Artificial Sequence
  ECMV IRES WT
gcccctctccctcccccccccctaacgttactggccgaagccgcttggaataaggccggtgtgcgtttgtctatatgttattttccaccatattgccgtcttttggcaatgtgagggcccggaaacctggccctgtcttcttgacgagcattcctaggggtctttcccctctcgccaaaggaatgcaaggtctgttgaatgtcgtgaaggaagcagttcctctggaagcttcttgaagacaaacaacgtctgtagcgaccctttgcaggcagcggaaccccccacctggcgacaggtgcctctgcggccaaaagccacgtgtataagatacacctgcaaaggcggcacaaccccagtgccacgttgtgagttggatagttgtggaaagagtcaaatggctctcctcaagcgtattcaacaaggggctgaaggatgcccagaaggtaccccattgtatgggatctgatctggggcctcggtgcacatgctttacatgtgtttagtcgaggttaaaaaaacgtctaggccccccgaaccacggggacgtggttttcctttgaaaaacacgatgataatatggccaca

SEQ ID NO: 105 - DNA, 795 bp, Artificial Sequence
  Kanomycin/Neomycin resistance gene (Kan/NeoR) from pIRES2-EGFP plasmid
atgattgaacaagatggattgcacgcaggttctccggccgcttgggtggagaggctattcggctatgactgggcacaacagacaatcggctgctctgatgccgccgtgttccggctgtcagcgcaggggcgcccggttctttttgtcaagaccgacctgtccggtgccctgaatgaactgcaagacgaggcagcgcggctatcgtggctggccacgacgggcgttccttgcgcagctgtgctcgacgttgtcactgaagcgggaagggactggctgctattgggcgaagtgccggggcaggatctcctgtcatctcaccttgctcctgccgagaaagtatccatcatggctgatgcaatgcggcggctgcatacgcttgatccggctacctgcccattcgaccaccaagcgaaacatcgcatcgagcgagcacgtactcggatggaagccggtcttgtcgatcaggatgatctggacgaagagcatcaggggctcgcgccagccgaactgttcgccaggctcaaggcgagcatgcccgacggcgaggatctcgtcgtgacccatggcgatgcctgcttgccgaatatcatggtggaaaatggccgcttttctggattcatcgactgtggccggctgggtgtggcggaccgctatcaggacatagcgttggctacccgtgatattgctgaagagcttggcggcgaatgggctgaccgcttcctcgtgctttacggtatcgccgctcccgattcgcagcgcatcgccttctatcgccttcttgacgagttcttctga

SEQ ID NO: 106 - DNA, 795 bp, Artificial Sequence
  Synthetic Kan/NeoR gene, human codon optimized, CpG-free (Variant 1)
atgatagaacaagatggacttcatgctggatctcctgcagcatgggtggaaagactttttggttatgattgggctcagcagacaattggatgttctgatgctgctgtgttcaggcttagtgcacagggtaggccagtgctctttgtgaagacagatctctctggagctttgaatgaactgcaggatgaggctgctaggctttcatggctggccaccacaggtgtcccttgtgctgcagtgttggatgtggttactgaggctgggagggattggctcctcctgggagaagtgccaggtcaggatctgttgagttctcacctggctccagctgaaaaagtctccataatggcagatgctatgagaaggctgcacacattggacccagctacatgcccatttgaccatcaggccaaacacaggattgagagggccagaacaagaatggaggctgggttggtggaccaggatgaccttgatgaggagcatcagggcctggctccagctgaattgtttgccaggctcaaggctagtatgcctgatggggaggacctggtggtaactcatggtgatgcctgtttgcctaacatcatggtggaaaatggaaggttctctggattcattgattgtggaagactgggtgtagctgacaggtatcaggacatagctcttgcaacaagggatattgcagaggagttgggtggagaatgggctgacaggttcctggtcttgtatggcattgctgccccagacagccaaagaattgctttctataggctgttggatgagtttttctaa

SEQ ID NO: 107 - DNA, 1157 bp, Artificial Sequence
  Kanomycin/Neomycin resistance (Kan/NeoR) transcription unit (CpG reduced)
gcggccgcgacctggttgttaattaaattgacatatctacctaatttgtgtataataaccctgataaatgcttcaataatattgaaaaaggaagagtcctgtataaaaagaaccagctgtggaatgtgtgtcagttagtaggcttatgcaaagtagcccgcccaagagacaggctgaggcccgcccaccatgatagaacaagatggacttcatgctggatctcctgcagcatgggtggaaagactttttggttatgattgggctcagcagaccattggatgttctgatgctgctgtgttcaggcttagtgcacagggtaggccagtgctctttgtgaagaccgatctctctggagctttgaatgaactgcaggatgaggctgctaggctttcatggctggccaccacaggtgtcccttgtgctgcagtgttggatgtggttactgaggctgggagggattggctcctcctgggagaagtgccaggtcaggatctgttgagttctcacctggctccagctgaaaaagtctccataatggcagatgctatgagaaggctgcacacattggacccagctacatgcccatttgaccatcaggccaaacacaggattgagagggccagaacaagaatggaggctgggttggtggaccaggatgaccttgatgaggagcatcagggcctggctccagctgaattgtttgccaggctcaaggctagtatgcctgatggggaggatctggtggtaactcatggtgatgcctgtttgcctaacatcatggtggaaaatggaaggttctctggattcattgattgtggaagactgggtgtagctgacaggtatcaggacatagctcttgcaacaagggatattgcagaggagttgggtggagaatgggctgacaggttcctggtcttgtatggcattgctgccccagacagccaaagaattgctttctataggctgttggatgagtttttctaagctcagcacccacaaagctctcaggtcctaagagacactggcacccatatccatgcatcccttgtataaataaagcatccagcaaagctggtaccatgtaaaactgtcttggttgtttccaaggtatagagcatagctcaataggtttttgactttgtcttagatcttcatga

SEQ ID NO: 108 - DNA, 29 bp, Artificial Sequence
  Bacterial Poromoter (for Kan/NeoR gene) - consensus sequences separated by 17 nucleotides
ttgacatatctacctaatttgtgtataat

SEQ ID NO: 109 - DNA, 795 bp, Artificial Sequence
  Synthetic Kan/NeoR gene, human codon optimized, CpG-free (Variant 2)
atgatagaacaagatggacttcatgctggatctcctgcagcatgggtggaaagactttttggttatgattgggctcagcagaccattggatgttctgatgctgctgtgttcaggcttagtgcacagggtaggccagtgctctttgtgaagaccgatctctctggagctttgaatgaactgcaggatgaggctgctaggctttcatggctggccaccacaggtgtcccttgtgctgcagtgttggatgtggttactgaggctgggagggattggctcctcctgggagaagtgccaggtcaggatctgttgagttctcacctggctccagctgaaaaagtctccataatggcagatgctatgagaaggctgcacacattggacccagctacatgcccatttgaccatcaggccaaacacaggattgagagggccagaacaagaatggaggctgggttggtggaccaggatgaccttgatgaggagcatcagggcctggctccagctgaattgtttgccaggctcaaggctagtatgcctgatggggaggatctggtggtaactcatggtgatgcctgtttgcctaacatcatggtggaaaatggaaggttctctggattcattgattgtggaagactgggtgtagctgacaggtatcaggacatagctcttgcaacaagggatattgcagaggagttgggtggagaatgggctgacaggttcctggtcttgtatggcattgctgccccagacagccaaagaattgctttctataggctgttggatgagtttttctaa

SEQ ID NO: 110 - protein, 264 aa, Artificial Sequence
  Kan/NeoR protein
MIEQDGLHAGSPAAWVERLFGYDWAQQTIGCSDAAVFRLSAQGRPVLFVKTDLSGALNELQDEAARLSWLATTGVPCAAVLDVVTEAGRDWLLLGEVPGQDLLSSHLAPAEKVSIMADAMRRLHTLDPATCPFDHQAKHRIERARTRMEAGLVDQDDLDEEHQGLAPAELFARLKASMPDGEDLVVTHGDACLPNIMVENGRFSGFIDCGRLGVADRYQDIALATRDIAEELGGEWADRFLVLYGIAAPDSQRIAFYRLLDEFF

SEQ ID NO: 111 - DNA, 31 bp, Artificial Sequence
  Linker in place of SV40 ori linker with flanking SexAI and PacI restriction sites
acctggttaggaggggaggaggattaattaa

SEQ ID NO: 112 - DNA, 75 bp, Artificial Sequence
  Multiple cloning site of pIRES2-EGFP vector
gctagcgctaccggactcagatctcgagctcaagcttcgaattctgcagtcgacggtaccgcgggcccgggatcc

SEQ ID NO: 113 - DNA, 303 bp, Artificial Sequence
  SV40 early promoter and origin of replication (prom/ori)
ggtgtggaaagtccccaggctccccagcaggcagaagtatgcaaagcatgcatctcaattagtcagcaaccaggtgtggaaagtccccaggctccccagcaggcagaagtatgcaaagcatgcatctcaattagtcagcaaccatagtcccgcccctaactccgcccatcccgcccctaactccgcccagttccgcccattctccgccccatggctgactaattttttttatttatgcagaggccgaggccgcctcggcctctgagctattccagaagtagtgaggaggcttttttggaggcc

SEQ ID NO: 114 - DNA, 354 bp, Artificial Sequence
  SV40 early promoter and origin of replication (prom/ori) from pIRES2-EGFP vector (plus additinal elements, e.g. enhancer elements)
ggtgtggaaagtccccaggctccccagcaggcagaagtatgcaaagcatgcatctcaattagtcagcaaccaggtgtggaaagtccccaggctccccagcaggcagaagtatgcaaagcatgcatctcaattagtcagcaaccatagtcccgcccctaactccgcccatcccgcccctaactccgcccagttccgcccattctccgccccatggctgactaattttttttatttatgcagaggccgaggccgcctcggcctctgagctattccagaagtagtgaggaggcttttttggaggcctaggcttttgcaaagatcgatcaagagacaggatgaggatcgtttcgcatg

SEQ ID NO: 115 - DNA, 357 bp, Artificial Sequence
  SV40 early promoter and origin of replication (prom/ori) (plus additinal elements, e.g. enhancer elements), CpG reduced
ggtgtggaaagtccccaggctccccagcaggcagaagtatgcaaagcatgcatctcaattagtcagcaaccaggtgtggaaagtccccaggctccccagcaggcagaagtatgcaaagcatgcatctcaattagtcagcaaccatagtcccgcccctaactccgcccatcccgcccctaactccgcccagttccgcccattctccgccccatggctgactaattttttttatttatgcagaggcggaggccgcctcggcctctgagctattccagaagtagtgaggaggcttttttggaggcctaggcttttgcaaagcccgcccaagagacaggatgaggaccgcccaccaccatg

SEQ ID NO: 116 - DNA, 176 bp, Artificial Sequence
  SV40 early promoter and origin of replication (CpG reduced, TCG reduced)
atcccgcccctaactccgcccagttccgcccattctccgccccatggctgactaattttttttatttatgcagaggcggaggccgcctcggcctctgagctattccagaagtagtgaggaggcttttttggaggcctaggcttttgcaaagcccgcccaagagacaggatgaggcc

SEQ ID NO: 117 - DNA, 456 bp, Artificial Sequence
  f1 single-strand DNA ori
aaattgtaagcgttaatattttgttaaaattcgcgttaaatttttgttaaatcagctcattttttaaccaataggccgaaatcggcaaaatcccttataaatcaaaagaatagaccgagatagggttgagtgttgttccagtttggaacaagagtccactattaaagaacgtggactccaacgtcaaagggcgaaaaaccgtctatcagggcgatggcccactacgtgaaccatcaccctaatcaagttttttggggtcgaggtgccgtaaagcactaaatcggaaccctaaagggagcccccgatttagagcttgacggggaaagccggcgaacgtggcgagaaaggaagggaagaaagcgaaaggagcgggcgctagggcgctggcaagtgtagcggtcacgctgcgcgtaaccaccacacccgccgcgcttaatgcgccgctacagggcgcgt

SEQ ID NO: 118 - DNA, 644 bp, Artificial Sequence
  pUC origin of replication
gtagaaaagatcaaaggatcttcttgagatcctttttttctgcgcgtaatctgctgcttgcaaacaaaaaaaccaccgctaccagcggtggtttgtttgccggatcaagagctaccaactctttttccgaaggtaactggcttcagcagagcgcagataccaaatactgtccttctagtgtagccgtagttaggccaccacttcaagaactctgtagcaccgcctacatacctcgctctgctaatcctgttaccagtggctgctgccagtggcgataagtcgtgtcttaccgggttggactcaagacgatagttaccggataaggcgcagcggtcgggctgaacggggggttcgtgcacacagcccagcttggagcgaacgacctacaccgaactgagatacctacagcgtgagctatgagaaagcgccacgcttcccgaagggagaaaggcggacaggtatccggtaagcggcagggtcggaacaggagagcgcacgagggagcttccagggggaaacgcctggtatctttatagtcctgtcgggtttcgccacctctgacttgagcgtcgatttttgtgatgctcgtcaggggggcggagcctatggaaaaacgccagcaacgcggcctttttacggttcct

SEQ ID NO: 119 - DNA, 267 bp, Artificial Sequence
  R6K gamma origin of replication (from pCpG-mSEAP vector (Invivogen))
aatcagcagttcaacctgttgatagtatgtactaagctctcatgtttaatgtactaagctctcatgtttaatgaactaaaccctcatggctaatgtactaagctctcatggctaatgtactaagctctcatgtttcatgtactaagctctcatgtttgaacaataaaattaatataaatcagcaacttaaatagcctctaaggttttaagttttataagaaaaaaaagaatatataaggcttttaaaggttttaaggtttcctagct

SEQ ID NO: 120 - DNA, 157 bp, Artificial Sequence
  SV40 prom/ori, plus flanking 5' SexAI and 3' PacI restriction sites
acctggttgcccatcccgcccctaactccgcccagttccgcccattctccgccccatggctgactaattttttttatttatgcagaggcggaggccgcctcggcctctgagctattccagaagtagtgaggaggcttttttggaggcccttaattaa

SEQ ID NO: 121 - DNA, 685 bp, Artificial Sequence
  pUC ori, plus flanking 5' PflFI and BglII and 3' AseI, NheI, and BamHI restriction sites
  misc_feature (1)...(9): PflFI restriction site
  misc_feature (12)...(17): BglII restriction site
  misc_feature (662)...(667): AseI restriction site
  misc_feature (617)...(676): NheI restriction site
  misc_feature (680)...(685): BamHI restriction site
gactttgtcttagatctgtagaaaagatcaaaggatcttcttgagatcctttttttctgcgcgtaatctgctgcttgcaaacaaaaaaaccaccgctaccagcggtggtttgtttgccggatcaagagctaccaactctttttccgaaggtaactggcttcagcagagcgcagataccaaatactgtccttctagtgtagccgtagttaggccaccacttcaagaactctgtagcaccgcctacatacctcgctctgctaatcctgttaccagtggctgctgccagtggcgataagtcgtgtcttaccgggttggactcaagacgatagttaccggataaggcgcagcggtcgggctgaacggggggttcgtgcacacagcccagcttggagcgaacgacctacaccgaactgagatacctacagcgtgagctatgagaaagcgccacgcttcccgaagggagaaaggcggacaggtatccggtaagcggcagggtcggaacaggagagcgcacgagggagcttccagggggaaacgcctggtatctttatagtcctgtcgggtttcgccacctctgacttgagcgtcgatttttgtgatgctcgtcaggggggcggagcctatggaaaaacgccagcaacgcggcctttttacggttcctattaatattgctagctttggatcc

SEQ ID NO: 122 - DNA, 5 bp, Artificial Sequence
  SV40 ori recognition motif
gaggc

SEQ ID NO: 123 - DNA, 23 bp, Artificial Sequence
  SV40 ori recognition sequence, WT
gaggccgaggccgcctcggcctc

SEQ ID NO: 124 - DNA, 23 bp, Artificial Sequence
  SV40 ori recognition sequence with 2 binding sites (generic)
  misc_feature 6, 12, 18: n = A,T,C or G
gaggcngaggcngcctcngcctc

SEQ ID NO: 125 - DNA, 23 bp, Artificial Sequence
  SV40 ori recognition sequence with 2 binding sites, variation 1
gaggccgaggccgcctccgcctc

SEQ ID NO: 126 - DNA, 23 bp, Artificial Sequence
  SV40 ori recognition sequence with 2 binding sites, variation 2
gaggccgaggccgcctctgcctc

SEQ ID NO: 127 - DNA, 23 bp, Artificial Sequence
  SV40 ori recognition sequence with 2 binding sites, variation 3
gaggccgaggccgcctcagcctc

SEQ ID NO: 128 - DNA, 23 bp, Artificial Sequence
  SV40 ori recognition sequence with 2 binding sites, variation 4
gaggcggaggccgcctcggcctc

SEQ ID NO: 129 - DNA, 23 bp, Artificial Sequence
  SV40 ori recognition sequence with 2 binding sites, variation 5
gaggcggaggccgcctccgcctc

SEQ ID NO: 130 - DNA, 23 bp, Artificial Sequence
  SV40 ori recognition sequence with 2 binding sites, variation 6
gaggcggaggccgcctcagcctc

SEQ ID NO: 131 - DNA, 23 bp, Artificial Sequence
  SV40 ori recognition sequence with 2 binding sites, variation 7
gaggcggaggccgcctctgcctc

SEQ ID NO: 132 - DNA, 23 bp, Artificial Sequence
  SV40 ori recognition sequence with 2 binding sites, variation 8
gaggcagaggccgcctcggcctc

SEQ ID NO: 133 - DNA, 23 bp, Artificial Sequence
  SV40 ori recognition sequence with 2 binding sites, variation 9
gaggcagaggccgcctccgcctc

SEQ ID NO: 134 - DNA, 23 bp, Artificial Sequence
  SV40 ori recognition sequence with 2 binding sites, variation 10
gaggcagaggccgcctcagcctc

SEQ ID NO: 135 - DNA, 23 bp, Artificial Sequence
  SV40 ori recognition sequence with 2 binding sites, variation 11
gaggcagaggccgcctctgcctc

SEQ ID NO: 136 - DNA, 23 bp, Artificial Sequence
  SV40 ori recognition sequence with 2 binding sites, variation 12
gaggctgaggccgcctcggcctc

SEQ ID NO: 137 - DNA, 23 bp, Artificial Sequence
  SV40 ori recognition sequence with 2 binding sites, variation 13
gaggctgaggccgcctccgcctc

SEQ ID NO: 138 - DNA, 23 bp, Artificial Sequence
  SV40 ori recognition sequence with 2 binding sites, variation 14
gaggctgaggccgcctcagcctc

SEQ ID NO: 139 - DNA, 23 bp, Artificial Sequence
  SV40 ori recognition sequence with 2 binding sites, variation 15
gaggctgaggccgcctctgcctc

SEQ ID NO: 140 - DNA, 23 bp, Artificial Sequence
  SV40 ori recognition sequence with 2 binding sites, variation 16
gaggctgaggccgcctctgcctc

SEQ ID NO: 141 - DNA, 23 bp, Artificial Sequence
  SV40 ori recognition sequence with 2 binding sites, variation 17
gaggccgaggcagcctcggcctc

SEQ ID NO: 142 - DNA, 23 bp, Artificial Sequence
  SV40 ori recognition sequence with 2 binding sites, variation 18
gaggccgaggcagcctccgcctc

SEQ ID NO: 143 - DNA, 23 bp, Artificial Sequence
  SV40 ori recognition sequence with 2 binding sites, variation 19
gaggccgaggcagcctctgcctc

SEQ ID NO: 144 - DNA, 23 bp, Artificial Sequence
  SV40 ori recognition sequence with 2 binding sites, variation 20
gaggccgaggcagcctcagcctc

SEQ ID NO: 145 - DNA, 23 bp, Artificial Sequence
  SV40 ori recognition sequence with 2 binding sites, variation 21
gaggcggaggcagcctcggcctc

SEQ ID NO: 146 - DNA, 23 bp, Artificial Sequence
  SV40 ori recognition sequence with 2 binding sites, variation 22
gaggcggaggcagcctccgcctc

SEQ ID NO: 147 - DNA, 23 bp, Artificial Sequence
  SV40 ori recognition sequence with 2 binding sites, variation 23
gaggcggaggcagcctcagcctc

SEQ ID NO: 148 - DNA, 23 bp, Artificial Sequence
  SV40 ori recognition sequence with 2 binding sites, variation 24
gaggcggaggcagcctctgcctc

SEQ ID NO: 149 - DNA, 23 bp, Artificial Sequence
  SV40 ori recognition sequence with 2 binding sites, variation 25
gaggcagaggcagcctcggcctc

SEQ ID NO: 150 - DNA, 23 bp, Artificial Sequence
  SV40 ori recognition sequence with 2 binding sites, variation 26
gaggcagaggcagcctccgcctc

SEQ ID NO: 151 - DNA, 23 bp, Artificial Sequence
  SV40 ori recognition sequence with 2 binding sites, variation 27
gaggcagaggcagcctcagcctc

SEQ ID NO: 152 - DNA, 23 bp, Artificial Sequence
  SV40 ori recognition sequence with 2 binding sites, variation 28
gaggcagaggcagcctctgcctc

SEQ ID NO: 153 - DNA, 23 bp, Artificial Sequence
  SV40 ori recognition sequence with 2 binding sites, variation 29
gaggctgaggcagcctcggcctc

SEQ ID NO: 154 - DNA, 23 bp, Artificial Sequence
  SV40 ori recognition sequence with 2 binding sites, variation 30
gaggctgaggcagcctccgcctc

SEQ ID NO: 155 - DNA, 23 bp, Artificial Sequence
  SV40 ori recognition sequence with 2 binding sites, variation 31
gaggctgaggcagcctcagcctc

SEQ ID NO: 156 - DNA, 23 bp, Artificial Sequence
  SV40 ori recognition sequence with 2 binding sites, variation 32
gaggctgaggcagcctctgcctc

SEQ ID NO: 157 - DNA, 23 bp, Artificial Sequence
  SV40 ori recognition sequence with 2 binding sites, variation 65
gaggccgaggctgcctcggcctc

SEQ ID NO: 158 - DNA, 23 bp, Artificial Sequence
  SV40 ori recognition sequence with 2 binding sites, variation 33
gaggccgaggctgcctccgcctc

SEQ ID NO: 159 - DNA, 23 bp, Artificial Sequence
  SV40 ori recognition sequence with 2 binding sites, variation 34
gaggccgaggctgcctctgcctc

SEQ ID NO: 160 - DNA, 23 bp, Artificial Sequence
  SV40 ori recognition sequence with 2 binding sites, variation 35
gaggccgaggctgcctcagcctc

SEQ ID NO: 161 - DNA, 23 bp, Artificial Sequence
  SV40 ori recognition sequence with 2 binding sites, variation 36
gaggcggaggctgcctcggcctc

SEQ ID NO: 162 - DNA, 23 bp, Artificial Sequence
  SV40 ori recognition sequence with 2 binding sites, variation 37
gaggcggaggctgcctccgcctc

SEQ ID NO: 163 - DNA, 23 bp, Artificial Sequence
  SV40 ori recognition sequence with 2 binding sites, variation 38
gaggcggaggctgcctccgcctc

SEQ ID NO: 164 - DNA, 23 bp, Artificial Sequence
  SV40 ori recognition sequence with 2 binding sites, variation 39
gaggcggaggctgcctcagcctc

SEQ ID NO: 165 - DNA, 23 bp, Artificial Sequence
  SV40 ori recognition sequence with 2 binding sites, variation 40
gaggcggaggctgcctctgcctc

SEQ ID NO: 166 - DNA, 23 bp, Artificial Sequence
  SV40 ori recognition sequence with 2 binding sites, variation 41
gaggcagaggctgcctcggcctc

SEQ ID NO: 167 - DNA, 23 bp, Artificial Sequence
  SV40 ori recognition sequence with 2 binding sites, variation 42
gaggcagaggctgcctccgcctc

SEQ ID NO: 168 - DNA, 23 bp, Artificial Sequence
  SV40 ori recognition sequence with 2 binding sites, variation 43
gaggcagaggctgcctcagcctc

SEQ ID NO: 169 - DNA, 23 bp, Artificial Sequence
  SV40 ori recognition sequence with 2 binding sites, variation 44
gaggcagaggctgcctctgcctc

SEQ ID NO: 170 - DNA, 23 bp, Artificial Sequence
  SV40 ori recognition sequence with 2 binding sites, variation 45
gaggctgaggctgcctcggcctc

SEQ ID NO: 171 - DNA, 23 bp, Artificial Sequence
  SV40 ori recognition sequence with 2 binding sites, variation 46
gaggctgaggctgcctccgcctc

SEQ ID NO: 172 - DNA, 23 bp, Artificial Sequence
  SV40 ori recognition sequence with 2 binding sites, variation 47
gaggctgaggctgcctcagcctc

SEQ ID NO: 173 - DNA, 23 bp, Artificial Sequence
  SV40 ori recognition sequence with 2 binding sites, variation 48
gaggctgaggctgcctctgcctc

SEQ ID NO: 174 - DNA, 23 bp, Artificial Sequence
  SV40 ori recognition sequence with 2 binding sites, variation 49
gaggccgaggcggcctcggcctc

SEQ ID NO: 175 - DNA, 23 bp, Artificial Sequence
  SV40 ori recognition sequence with 2 binding sites, variation 50
gaggccgaggcggcctccgcctc

SEQ ID NO: 176 - DNA, 23 bp, Artificial Sequence
  SV40 ori recognition sequence with 2 binding sites, variation 51
gaggccgaggcggcctctgcctc

SEQ ID NO: 177 - DNA, 23 bp, Artificial Sequence
  SV40 ori recognition sequence with 2 binding sites, variation 52
gaggccgaggcggcctcagcctc

SEQ ID NO: 178 - DNA, 23 bp, Artificial Sequence
  SV40 ori recognition sequence with 2 binding sites, variation 53
gaggcggaggcggcctcggcctc

SEQ ID NO: 179 - DNA, 23 bp, Artificial Sequence
  SV40 ori recognition sequence with 2 binding sites, variation 54
gaggcggaggcggcctccgcctc

SEQ ID NO: 180 - DNA, 23 bp, Artificial Sequence
  SV40 ori recognition sequence with 2 binding sites, variation 55
gaggcggaggcggcctcagcctc

SEQ ID NO: 181 - DNA, 23 bp, Artificial Sequence
  SV40 ori recognition sequence with 2 binding sites, variation 56
gaggcggaggcggcctctgcctc

SEQ ID NO: 182 - DNA, 23 bp, Artificial Sequence
  SV40 ori recognition sequence with 2 binding sites, variation 57
gaggcagaggcggcctcggcctc

SEQ ID NO: 183 - DNA, 23 bp, Artificial Sequence
  SV40 ori recognition sequence with 2 binding sites, variation 58
gaggcagaggcggcctccgcctc

SEQ ID NO: 184 - DNA, 23 bp, Artificial Sequence
  SV40 ori recognition sequence with 2 binding sites, variation 59
gaggcagaggcggcctcagcctc

SEQ ID NO: 185 - DNA, 23 bp, Artificial Sequence
  SV40 ori recognition sequence with 2 binding sites, variation 60
gaggcagaggcggcctctgcctc

SEQ ID NO: 186 - DNA, 23 bp, Artificial Sequence
  SV40 ori recognition sequence with 2 binding sites, variation 61
gaggctgaggcggcctcggcctc

SEQ ID NO: 187 - DNA, 23 bp, Artificial Sequence
  SV40 ori recognition sequence with 2 binding sites, variation 62
gaggctgaggcggcctccgcctc

SEQ ID NO: 188 - DNA, 23 bp, Artificial Sequence
  SV40 ori recognition sequence with 2 binding sites, variation 63
gaggctgaggcggcctcagcctc

SEQ ID NO: 189 - DNA, 23 bp, Artificial Sequence
  SV40 ori recognition sequence with 2 binding sites, variation 64
gaggctgaggcggcctctgcctc

SEQ ID NO: 190 - DNA, 150 bp, Artificial Sequence
  Synthetic polyadenylation (pA) signal for the Kan/NeoR gene
gctcagcacccacaaagctctcaggtcctaagagacactggcacccatatccatgcatcccttgtataaataaagcatccagcaaagctggtaccatgtaaaactgtcttggttgtttccaaggtatagagcatagctcaataggttttt

SEQ ID NO: 191 - DNA, 696 bp, Artificial Sequence
  SV40 polyadenylation signal (pA), unmodified
actctagatcataatcagccataccacatttgtagaggttttacttgctttaaaaaacctcccacacctccccctgaacctgaaacataaaatgaatgcaattgttgttgttaacttgtttattgcagcttataatggttacaaataaagcaatagcatcacaaatttcacaaataaagcatttttttcactgcattctagttgtggtttgtccaaactcatcaatgtatcttaaggcgtaaattgtaagcgttaatattttgttaaaattcgcgttaaatttttgttaaatcagctcattttttaaccaataggccgaaatcggcaaaatcccttataaatcaaaagaatagaccgagatagggttgagtgttgttccagtttggaacaagagtccactattaaagaacgtggactccaacgtcaaagggcgaaaaaccgtctatcagggcgatggcccactacgtgaaccatcaccctaatcaagttttttggggtcgaggtgccgtaaagcactaaatcggaaccctaaagggagcccccgatttagagcttgacggggaaagccggcgaacgtggcgagaaaggaagggaagaaagcgaaaggagcgggcgctagggcgctggcaagtgtagcggtcacgctgcgcgtaaccaccacacccgccgcgcttaatgcgccgctacagggcgcgt

SEQ ID NO: 192 - DNA, 584 bp, Artificial Sequence
  Fragment containing HSV-TK polyadenylation signal (pA)
gcgggactctggggttcgaaatgaccgaccaagcgacgcccaacctgccatcacgagatttcgattccaccgccgccttctatgaaaggttgggcttcggaatcgttttccgggacgccggctggatgatcctccagcgcggggatctcatgctggagttcttcgcccaccctagggggaggctaactgaaacacggaaggagacaataccggaaggaacccgcgctatgacggcaataaaaagacagaataaaacgcacggtgttgggtcgtttgttcataaacgcggggttcggtcccagggctggcactctgtcgataccccaccgagaccccattggggccaatacgcccgcgtttcttccttttccccaccccaccccccaagttcgggtgaaggcccagggctcgcagccaacgtcggggcggcaggccctgccatagcctcaggttactcatatatactttagattgatttaaaacttcatttttaatttaaaaggatctaggtgaagatcctttttgataatctcatgaccaaaatcccttaacgtgagttttcgttccactgagcgtcagacccc

SEQ ID NO: 193 - DNA, 156 bp, Artificial Sequence
  Synthetic polyadenylation (pA) sequence for HSV1-TK gene
gcactgcatggacttacctgcctggtggtatcagtcacaggctctgataaggattcagctgttgtataaataaagcatgcagcctagcaggaaccatgttaatctctcttggttgtttccttggaatactcctaagcacattaggtttttagatct

SEQ ID NO: 194 - DNA, 211 bp, Artificial Sequence
  Second gene position synthetic pA, linking region to SV40 early promoter/ori
atcataatcagccataccacacctccccctgaacctgaaaaatgaatgcaattgttgttgaaataaagcacccagcaatgcctgggaccatgtaaaactgtcctggttctttccaaggtatagagcatagcccacaggctgatatttctggccagggttggttggaggacagccttgtctataggaagagaatgaggtttttgcacttaag

SEQ ID NO: 195 - DNA, 416 bp, Artificial Sequence
  Synthetic DNA fragment encoding a synthetic pA signal for 2nd position and SV40 ori, separated by a SexAI restriction site,with flanking 5' NotI and 3' PacI restriction sites
gcggccgcgactctagatcataatcagccataccacacctccccctgaacctgaaaaatcaatgcaattattgttgaaataaagcacccagcaatgcctgggaccatgtaaaactgtcctggttctttccaaggtatagagcatagcccacaggctgatatttctggccagggttggttggaggacagccttgtctataggaagagaatgaggtttttgcactataagggcatgcaagtcagtcccgcccctaactccacctggttgcccatcccgcccctaactccgcccagttccgcccattctccgccccatggctgactaattttttttatttatgcagaggcggaggccgcctcggcctctgagctattccagaagtagtgaggaggcttttttggaggcccttaattaaa

SEQ ID NO: 196 - DNA, 266 bp, Artificial Sequence
  Synthetic pA for second gene position, with flanking 5' NotI and 3' SexA1 restriction sites
gcggccgcgactctagatcataatcagccataccacacctccccctgaacctgaaaaatcaatgcaattattgttgaaataaagcacccagcaatgcctgggaccatgtaaaactgtcctggttctttccaaggtatagagcatagcccacaggctgatatttctggccagggttggttggaggacagccttgtctataggaagagaatgaggtttttgcactataagggcatgcaagtcagtcccgcccctaactccacctggtt

SEQ ID NO: 197 - RNA, 6 nt, Artificial Sequence
  polyadenylation cleavage site
aauaaa

SEQ ID NO: 198 - DNA, 425 bp, Artificial Sequence
  dSV4-SV40pA 2, with flanking NotI and PacI restriction sites
gcggccgcgtggccagacatgataagatacattgatgagtttggacaaaccacaactagaatgcagtgaaaaaaatgctttatttgtgaaatttgtgatgctattgctttatttgtaaccattataagctgcaataaacaagttaacaacaacaattgcattcattttatgtttcaggttcagggggaggtgtgggaggttttttaaagcaagtaaaacctctacaaatgtggtatgggcactataagggcatgcaagtcagtcccgcccctaactccacctggttgcccatcccgcccctaactccgcccagttccgcccattctccgccccatggctgactaattttttttatttatgcaggaggggaggaggtgagctattccagaagtagtgaggaggcttttttggaggcccttaattaa

SEQ ID NO: 199 - DNA, 292 bp, Artificial Sequence
  dSV4-SV40pA, with flanking NotI and PacI restriction sites
gcggccgcgtggccagacatgataagatacattgatgagtttggacaaaccacaactagaatgcagtgaaaaaaatgctttatttgtgaaatttgtgatgctattgctttatttgtaaccattataagctgcaataaacaagttaacaacaacaattgcattcattttatgtttcaggttcagggggaggtgtgggaggttttttaaagcaagtaaaacctctacaaatgtggtatgggcactataagggcatgcaagtcagtcccgcccctaactcccatatgttaattaa

SEQ ID NO: 200 - DNA, 415 bp, Artificial Sequence
  BB5-bovine growth hormone (BGH) pA and SV40 ori, with flnaking 5' NotI and XbaI and 3' PacI restricion sites
gcggccgcgactctagatcataatcagccataccacacctccccctgaacctgaaaaatcaatgcaattattgttgaaataaagcacccagcaatgcctgggaccatgtaaaactgtcctggttctttccaaggtatagagcatagcccacaggctgatatttctggccagggttggttggaggacagccttgtctataggaagagaatgaggtttttgcactataagggcatgcaagtcagtcccgcccctaactccacctggttgcccatcccgcccctaactccgcccagttccgcccattctccgccccatggctgactaattttttttatttatgcagaggccgaggccgcctcggcctctgagctattccagaagtagtgaggaggcttttttggaggcccttaattaa

SEQ ID NO: 201 - DNA, 426 bp, Artificial Sequence
  BB4-SV40v pA and SV40 ori, with flnaking 5' NotI and 3' PacI restricion sites
gcggccgcgtggccagacatgataagatacattgatgagtttggacaaaccacaactagaatgcagtgaaaaaaatgctttatttgtgaaatttgtgatgctattgctttatttgtaaccattataagctgcaataaacaagttaacaacaacaattgcattcattttatgtttcaggttcagggggaggtgtgggaggttttttaaagcaagtaaaacctctacaaatgtggtatgggcactataagggcatgcaagtcagtcccgcccctaactccacctggttgcccatcccgcccctaactccgcccagttccgcccattctccgccccatggctgactaattttttttatttatgcaggaggggaggaggtgagctattccagaagtagtgaggaggcttttttggaggcccttaattaaa

SEQ ID NO: 202 - DNA, 48 bp, Artificial Sequence
  SV40TAg mutant Leu19Phe (L19F) forward primer
caactgatggatctgttgggatttgagaggtctgcatggggtaatatc

SEQ ID NO: 203 - DNA, 48 bp, Artificial Sequence
  SV40TAg mutant Leu19Phe (L19F) reverse primer
gatattaccccatgcagacctctcaaatcccaacagatccatcagttg

SEQ ID NO: 204 - DNA, 44 bp, Artificial Sequence
  SV40TAg mutant Pro28Ser (P28S) forward primer
ggtctgcatggggtaatatctcccttatgaggaaagcatacctg

SEQ ID NO: 205 - DNA, 44 bp, Artificial Sequence
  SV40TAg mutant Pro28Ser (P28S) reverse primer
caggtatgctttcctcataagggagatattaccccatgcagacc

SEQ ID NO: 206 - DNA, 33 bp, Artificial Sequence
  SV40TAg mutant Leu103Pro (L103P) forward primer
catttaatgaagagaatccattttgctctgagg

SEQ ID NO: 207 - DNA, 33 bp, Artificial Sequence
  SV40TAg mutant Leu103Pro (L103P) reverse primer
cctcagagcaaaatggattctcttcattaaatg

SEQ ID NO: 208 - DNA, 32 bp, Artificial Sequence
  SV40TAg mutant Cys105Ala (C105A) forward primer
gaagagaatttgtttgcttctgaggaaatgcc

SEQ ID NO: 209 - DNA, 32 bp, Artificial Sequence
  SV40TAg mutant Cys105Ala (C105A) reverse primer
ggcatttcctcagaagcaaacaaattctcttc

SEQ ID NO: 210 - DNA, 37 bp, Artificial Sequence
  SV40TAg mutant Glu107Leu (E107L) forward primer
gagaatttgttttgctctctggaaatgcctagttctg

SEQ ID NO: 211 - DNA, 37 bp, Artificial Sequence
  SV40TAg mutant Glu107Leu (E107L) reverse primer
cagaactaggcatttccagagagcaaaacaaattctc

SEQ ID NO: 212 - DNA, 37 bp, Artificial Sequence
  SV40TAg mutant Glu107Lys (E107K) forward primer
gagaatttgttttgctctaaggaaatgcctagttctg

SEQ ID NO: 213 - DNA, 37 bp, Artificial Sequence
  SV40TAg mutant Glu107Lys (E107K) reverse primer
cagaactaggcatttccttagagcaaaacaaattctc

SEQ ID NO: 214 - DNA, 35 bp, Artificial Sequence
  SV40TAg mutant Glu108Leu (E108L) forward primer
gaatttgttttgctctgagctcatgcctagttctg

SEQ ID NO: 215 - DNA, 35 bp, Artificial Sequence
  SV40TAg mutant Glu108Leu (E108L) reverse primer
cagaactaggcatgagctcagagcaaaacaaattc

SEQ ID NO: 216 - DNA, 26 bp, Artificial Sequence
  SV40TAg mutant Ser112Asn (S112N) forward primer
ggaaatgcctagtaatgatgatgagg

SEQ ID NO: 217 - DNA, 26 bp, Artificial Sequence
  SV40TAg mutant Ser112Asn (S112N) reverse primer
cctcatcatcattactaggcatttcc

SEQ ID NO: 218 - DNA, 30 bp, Artificial Sequence
  SV40TAg mutant Ser189Asn (S189N) forward primer
ccaggcacaacaactataatcataatattc

SEQ ID NO: 219 - DNA, 30 bp, Artificial Sequence
  SV40TAg mutant Ser189Asn (S189N) reverse primer
gaatattatgattatagttgttgtgcctgg

SEQ ID NO: 220 - DNA, 44 bp, Artificial Sequence
  SV40TAg mutant Asp402Arg (D402R) forward primer
cactgtctcctccctaaaatgaggagtgtagtctatgacttcct

SEQ ID NO: 221 - DNA, 44 bp, Artificial Sequence
  SV40TAg mutant Asp402Arg (D402R) reverse primer
aggaagtcatagactacactcctcattttagggaggagacagtg

SEQ ID NO: 222 - DNA, 45 bp, Artificial Sequence
  SV40TAg mutant Pro453Ser (P453S) forward primer
ggaaagctctcaatgtcaacctgtcccttgatagactcaactttg

SEQ ID NO: 223 - DNA, 45 bp, Artificial Sequence
  SV40TAg mutant Pro453Ser (P453S) reverse primer
caaagttgagtctatcaagggacaggttgacattgagagctttcc

SEQ ID NO: 224 - DNA, 47 bp, Artificial Sequence
  SV40TAg mutant Val585Arg (V585R) forward primer
tatgctgatatggtatagaccaagggctgagtttgcccaaagcattc

SEQ ID NO: 225 - DNA, 47 bp, Artificial Sequence
  SV40TAg mutant Val585Arg (V585R) reverse primer
gaatgctttgggcaaactcagcccttggtctataccatatcagcata

SEQ ID NO: 226 - DNA, 42 bp, Artificial Sequence
  SV40TAg mutant Asp604Arg (D604R) forward primer
tgagtggaaagaaaggcttagaaaggagttttctctttcagt

SEQ ID NO: 227 - DNA, 42 bp, Artificial Sequence
  SV40TAg mutant Asp604Arg (D604R) reverse primer
actgaaagagaaaactcctttctaagcctttctttccactca

SEQ ID NO: 228 - DNA, 46 bp, Artificial Sequence
  SV40TAg mutant delta 366-370 forward primer
ggagcagatgttgacaaataggttcagaatggacataatgtttggc

SEQ ID NO: 229 - DNA, 46 bp, Artificial Sequence
  SV40TAg mutant delta 366-370 reverse primer
gccaaacattatgtccattctgaacctatttgtcaacatctgctcc

SEQ ID NO: 230 - DNA, 45 bp, Artificial Sequence
  SV40TAg mutant delta 434-444 forward primer
ggacccattgattcagggaaaactggaaagctctcaatgtcaacc

SEQ ID NO: 231 - DNA, 45 bp, Artificial Sequence
  SV40TAg mutant delta 434-444 reverse primer
ggttgacattgagagctttccagttttccctgaatcaatgggtcc

SEQ ID NO: 232 - DNA, 39 bp, Artificial Sequence
  SV40TAg mutant Leu103Pro, Cys105Ala (L103P/C105A) forward primer
catttaatgaagagaatccatttgcttctgaggaaatgc

SEQ ID NO: 233 - DNA, 39 bp, Artificial Sequence
  SV40TAg mutant Leu103Pro, Cys105Ala (L103P/C105A) reverse primer
gcatttcctcagaagcaaatggattctcttcattaaatg

SEQ ID NO: 234 - DNA, 44 bp, Artificial Sequence
  SV40TAg mutant Leu103Pro, Glu107Leu  (L103P/E107L) forward primer
gcatttaatgaagagaatccattttgctctctggaaatgcctag

SEQ ID NO: 235 - DNA, 44 bp, Artificial Sequence
  SV40TAg mutant Leu103Pro, Glu107Leu  (L103P/E107L) reverse primer
ctaggcatttccagagagcaaaatggattctcttcattaaatgc

SEQ ID NO: 236 - DNA, 47 bp, Artificial Sequence
  SV40TAg mutant Leu103Pro, Glu108Leu (L103P/E108L) forward primer
gcatttaatgaagagaatccattttgctctgagctcatgcctagttc

SEQ ID NO: 237 - DNA, 47 bp, Artificial Sequence
  SV40TAg mutant Leu103Pro, Glu108Leu (L103P/E108L) reverse primer
gaactaggcatgagctcagagcaaaatggattctcttcattaaatgc

SEQ ID NO: 238 - DNA, 48 bp, Artificial Sequence
  SV40TAg mutant Cys105Ala, Glu107Leu (C105A/E107L) forward primer
gaagagaatttgtttgcttctctggaaatgcctagttctgatgatgag

SEQ ID NO: 239 - DNA, 48 bp, Artificial Sequence
  SV40TAg mutant Cys105Ala, Glu107Leu (C105A/E107L) reverse primer
ctcatcatcagaactaggcatttccagagaagcaaacaaattctcttc

SEQ ID NO: 240 - DNA, 48 bp, Artificial Sequence
  SV40TAg mutant Cys105Ala, Glu108Leu (C105A/E108L) forward primer
gaagagaatttgtttgcttctgagctcatgcctagttctgatgatgag

SEQ ID NO: 241 - DNA, 48 bp, Artificial Sequence
  SV40TAg mutant Cys105Ala, Glu108Leu (C105A/E108L) reverse primer
ctcatcatcagaactaggcatgagctcagaagcaaacaaattctcttc

SEQ ID NO: 242 - DNA, 48 bp, Artificial Sequence
  SV40TAg mutant Glu107Leu, Glu108Leu (G107L/G108L) forward primer
gaagagaatttgttttgctctctgctcatgcctagttctgatgatgag

SEQ ID NO: 243 - DNA, 48 bp, Artificial Sequence
  SV40TAg mutant Glu107Leu, Glu108Leu (G107L/G108L) reverse primer
ctcatcatcagaactaggcatgagcagagagcaaaacaaattctcttc

SEQ ID NO: 244 - DNA, 46 bp, Artificial Sequence
  SV40TAg mutant Cys105Ala, Glu107Leu, Glu108Leu (C105A/G107L/G108L) forward primer
gaagagaatttgtttgcttctctgctcatgcctagttctgatgatg

SEQ ID NO: 245 - DNA, 46 bp, Artificial Sequence
  SV40TAg mutant Cys105Ala, Glu107Leu, Glu108Leu (C105A/G107L/G108L) reverse primer
catcatcagaactaggcatgagcagagaagcaaacaaattctcttc

SEQ ID NO: 246 - DNA, 60 bp, Artificial Sequence
  SV40TAg mutant Leu103Pro, Glu107Leu, Glu108Leu (L103P/G107L/G108L) forward primer
ggaatgcatttaatgaagagaatccattttgctctctgctcatgcctagttctgatgatg

SEQ ID NO: 247 - DNA, 60 bp, Artificial Sequence
  SV40TAg mutant Leu103Pro, Glu107Leu, Glu108Leu (L103P/G107L/G108L) reverse primer
catcatcagaactaggcatgagcagagagcaaaatggattctcttcattaaatgcattcc

SEQ ID NO: 248 - DNA, 60 bp, Artificial Sequence
  SV40TAg mutant Leu103Pro, Cys105Ala, Glu107Leu, Glu108Leu (L103P/C105A/E107L/E108L) forward primer
ggaatgcatttaatgaagagaatccatttgcttctctgctcatgcctagttctgatgatg

SEQ ID NO: 249 - DNA, 60 bp, Artificial Sequence
  SV40TAg mutant Leu103Pro, Cys105Ala, Glu107Leu, Glu108Leu (L103P/C105A/E107L/E108L) reverse primer
catcatcagaactaggcatgagcagagaagcaaatggattctcttcattaaatgcattcc

SEQ ID NO: 250 - DNA, 44 bp, Artificial Sequence
  SV40TAg mutant Glu107Leu, Glu108Leu, Ser112Asn (E107L/E108L/S112N) forward primer
gaatttgttttgctctctgctcatgcctagtaatgatgatgagg

SEQ ID NO: 251 - DNA, 44 bp, Artificial Sequence
  SV40TAg mutant Glu107Leu, Glu108Leu, Ser112Asn (E107L/E108L/S112N) reverse primer
cctcatcatcattactaggcatgagcagagagcaaaacaaattc

SEQ ID NO: 252 - DNA, 49 bp, Artificial Sequence
  SV40TAg mutant Cys105Ala, Glu107Leu, Glu108Leu, Ser112Asn (C105A/E107L/E108L/S112N) forward primer
gaagagaatttgtttgcttctctgctcatgcctagtaatgatgatgagg

SEQ ID NO: 253 - DNA, 49 bp, Artificial Sequence
  SV40TAg mutant Cys105Ala, Glu107Leu, Glu108Leu, Ser112Asn (C105A/E107L/E108L/S112N) reverse primer
cctcatcatcattactaggcatgagcagagaagcaaacaaattctcttc

SEQ ID NO: 254 - DNA, 49 bp, Artificial Sequence
  SV40TAg mutant Cys105Ala, Glu108Leu, Ser112Asn (C105A/E108L/S112N) forward primer
gaagagaatttgtttgcttctgagctcatgcctagtaatgatgatgagg

SEQ ID NO: 255 - DNA, 49 bp, Artificial Sequence
  SV40TAg mutant Cys105Ala, Glu108Leu, Ser112Asn (C105A/E108L/S112N) reverse primer
cctcatcatcattactaggcatgagctcagaagcaaacaaattctcttc

SEQ ID NO: 256 - DNA, 49 bp, Artificial Sequence
  SV40TAg mutant Cys105Ala, Glu107Leu, Ser112Asn (C105A/E107L/S112N) forward primer
gaagagaatttgtttgcttctctggaaatgcctagtaatgatgatgagg

SEQ ID NO: 257 - DNA, 49 bp, Artificial Sequence
  SV40TAg mutant Cys105Ala, Glu107Leu, Ser112Asn (C105A/E107L/S112N) reverse primer
cctcatcatcattactaggcatttccagagaagcaaacaaattctcttc

SEQ ID NO: 258 - DNA, 44 bp, Artificial Sequence
  SV40TAg mutant Cys105Ala, Ser112Asn (C105A/S112N) forward primer
gaatttgtttgcttctgaggaaatgcctagtaatgatgatgagg

SEQ ID NO: 259 - DNA, 44 bp, Artificial Sequence
  SV40TAg mutant Cys105Ala, Ser112Asn (C105A/S112N) reverse primer
cctcatcatcattactaggcatttcctcagaagcaaacaaattc

SEQ ID NO: 260 - DNA, 26 bp, Artificial Sequence
  Gly105Ala (G105A) mutation of SV5F protein, forward primer
ggagatttgctgcagttgtgattggg

SEQ ID NO: 261 - DNA, 26 bp, Artificial Sequence
  Gly105Ala (G105A) mutation of SV5F protein, reverse primer
cccaatcacaactgcagcaaatctcc

SEQ ID NO: 262 - DNA, 30 bp, Artificial Sequence
  Gly109Ala (G109A) mutation of SV5F protein, forward primer
gctggagttgtgattgccctggctgccctg

SEQ ID NO: 263 - DNA, 30 bp, Artificial Sequence
  Gly109Ala (G109A) mutation of SV5F protein, reverse primer
cagggcagccagggcaatcacaactccagc

SEQ ID NO: 264 - DNA, 34 bp, Artificial Sequence
  Gly114Ala (G114A) mutation of SV5F protein, forward primer
gggctggctgccctggctgtggctacagcagcac

SEQ ID NO: 265 - DNA, 34 bp, Artificial Sequence
  Gly114Ala (G114A) mutation of SV5F protein, reverse primer
gtgctgctgtagccacagccagggcagccagccc

SEQ ID NO: 266 - DNA, 44 bp, Artificial Sequence
  Gly105Ala, Gly109Ala (G105A/G109A) mutation of SV5F protein, forward primer
gagaaggagatttgctgcagttgtgattgccctggctgccctgg

SEQ ID NO: 267 - DNA, 44 bp, Artificial Sequence
  Gly105Ala, Gly109Ala (G105A/G109A) mutation of SV5F protein, reverse primer
ccagggcagccagggcaatcacaactgcagcaaatctccttctc

SEQ ID NO: 268 - DNA, 60 bp, Artificial Sequence
  Gly105Ala, Gly114Ala (G105A/G114A) mutation of SV5F protein, forward primer
gagaaggagatttgctgcagttgtgattgggctggctgccctggctgtggctacagcagc

SEQ ID NO: 269 - DNA, 60 bp, Artificial Sequence
  Gly105Ala, Gly114Ala (G105A/G114A) mutation of SV5F protein, reverse primer
gctgctgtagccacagccagggcagccagcccaatcacaactgcagcaaatctccttctc

SEQ ID NO: 270 - DNA, 47 bp, Artificial Sequence
  Gly109Ala, Gly114Ala (G109A/G114A) mutation of SV5F protein, forward primer
gctggagttgtgattgccctggctgccctggctgtggctacagcagc

SEQ ID NO: 271 - DNA, 47 bp, Artificial Sequence
  Gly109Ala, Gly114Ala (G109A/G114A) mutation of SV5F protein, reverse primer
gctgctgtagccacagccagggcagccagggcaatcacaactccagc

SEQ ID NO: 272 - DNA, 60 bp, Artificial Sequence
  Gly105Ala, Gly109Ala, Gly114Ala (G105A/G109A/G114A) mutation of SV5F protein, forward primer
gagaaggagatttgctgcagttgtgattgccctggctgccctggctgtggctacagcagc

SEQ ID NO: 273 - DNA, 60 bp, Artificial Sequence
  Gly105Ala, Gly109Ala, Gly114Ala (G105A/G109A/G114A) mutation of SV5F protein, reverse primer
gctgctgtagccacagccagggcagccagggcaatcacaactgcagcaaatctccttctc

SEQ ID NO: 274 - DNA, 59 bp, Artificial Sequence
  ARVp10 Gene Synthesis Oligo AF1, forward primer
ttcatccatcattgcatactggccttacctggcagctggaggtggctttctcctgatag

SEQ ID NO: 275 - DNA, 59 bp, Artificial Sequence
  ARVp10 Gene Synthesis Oligo AF2, forward primer
aagcagctcagaatactgctggtggggatctgcaggccacttcatccatcattgcatac

SEQ ID NO: 276 - DNA, 57 bp, Artificial Sequence
  ARVp10 Gene Synthesis Oligo AF3, forward primer
gtaatggtgctacagctgtgtttggaaatgttcactgtcaagcagctcagaatactg

SEQ ID NO: 277 - DNA, 51 bp, Artificial Sequence
  ARVp10 Gene Synthesis Oligo AF4, forward primer
gctagaccatgctcagaatgcctccaggaagttgtaatggtgctacagctg

SEQ ID NO: 278 - DNA, 30 bp, Artificial Sequence
  ARVp10 Gene Synthesis Oligo AF5, forward primer
ggaggagctagctagaccatgctcagaatg

SEQ ID NO: 279 - DNA, 59 bp, Artificial Sequence
  ARVp10 Gene Synthesis Oligo AR1, reverse primer
tgattttggccttgcaacagtacagcagggcaaaaataatgactatcaggagaaagcca

SEQ ID NO: 280 - DNA, 59 bp, Artificial Sequence
  ARVp10 Gene Synthesis Oligo AR2, reverse primer
caccagctccctgtggaagacacttctggcagcatctgctttgattttggccttgcaac

SEQ ID NO: 281 - DNA, 59 bp, Artificial Sequence
  ARVp10 Gene Synthesis Oligo AR3, reverse primer
atatggaggagccatagcattgtgcttgccagagctgagagccaccagctccctgtgga

SEQ ID NO: 282 - DNA, 41 bp, Artificial Sequence
  ARVp10 Gene Synthesis Oligo AR4, reverse primer
gtccattcggatccttaaacatcatatggaggagccatagc

SEQ ID NO: 283 - DNA, 59 bp, Artificial Sequence
  RRVp14 Gene Synthesis Oligo RRF1, forward primer
accttcctggcatttggcttctggctgttcaagtacctgcagaagaggagagaaagaag

SEQ ID NO: 284 - DNA, 59 bp, Artificial Sequence
  RRVp14 Gene Synthesis Oligo RRF2, forward primer
cacactatttgggaggtcattgcaggcttggtggctcttttgaccttcctggcatttgg

SEQ ID NO: 285 - DNA, 59 bp, Artificial Sequence
  RRVp14 Gene Synthesis Oligo RRF3, forward primer
ggctggagaagggagcagataaagttgctgggaccatcagccacactatttgggaggtc

SEQ ID NO: 286 - DNA, 59 bp, Artificial Sequence
  RRVp14 Gene Synthesis Oligo RRF4, forward primer
atctaattttgttaatcatgcacctggggaagccattgtgactgggctggagaagggag

SEQ ID NO: 287 - DNA, 47 bp, Artificial Sequence
  RRVp14 Gene Synthesis Oligo RRF5, forward primer
gctagctagaccatgggatctgggccatctaattttgttaatcatgc

SEQ ID NO: 288 - DNA, 59 bp, Artificial Sequence
  RRVp14 Gene Synthesis Oligo RRR1, reverse primer
tttctcagatacctcttctggaattctgtgagctgtctccttctttctctcctcttctg

SEQ ID NO: 289 - DNA, 59 bp, Artificial Sequence; identical to SEQ ID NO: 280
  RRVp14 Gene Synthesis Oligo RRR2, reverse primer

SEQ ID NO: 290 - DNA, 59 bp, Artificial Sequence; identical to SEQ ID NO: 281
  RRVp14 Gene Synthesis Oligo RRR3, reverse primer

SEQ ID NO: 291 - DNA, 41 bp, Artificial Sequence; identical to SEQ ID NO: 282
  RRVp14 Gene Synthesis Oligo RRR4, reverse primer

SEQ ID NO: 292 - DNA, 41 bp, Artificial Sequence; identical to SEQ ID NO: 282
  RRVp14 Gene Synthesis Oligo RRR5, reverse primer

SEQ ID NO: 293 - DNA, 59 bp, Artificial Sequence
  BRVp15 Gene Synthesis Oligo BRF1, forward primer
gaacaagaagaggaaggaacagatcagagaacagattgaattgggattgctgtcttatg

SEQ ID NO: 294 - DNA, 59 bp, Artificial Sequence
  BRVp15 Gene Synthesis Oligo BRF2, forward primer
ttcctctataaactcctgcagtggtataacagaaagtcaaagaacaagaagaggaagga

SEQ ID NO: 295 - DNA, 59 bp, Artificial Sequence
  BRVp15 Gene Synthesis Oligo BRF3, forward primer
ggatcatcatagctgtgggcatttttgcattcatcttttctttcctctataaactcctg

SEQ ID NO: 296 - DNA, 59 bp, Artificial Sequence
  BRVp15 Gene Synthesis Oligo BRF4, forward primer
ctccacctaatgcctttgtggaaattgtttctagttctacagggatcatcatagctgtg

SEQ ID NO: 297 - DNA, 56 bp, Artificial Sequence
  BRVp15 Gene Synthesis Oligo BRF5, forward primer
catgggacaaagacacagtattgtacaaccaccagcacctccacctaatgcctttg

SEQ ID NO: 298 - DNA, 29 bp, Artificial Sequence
  BRVp15 Gene Synthesis Oligo BRF6, forward primer
gctagctagaccatgggacaaagacacag

SEQ ID NO: 299 - DNA, 59 bp, Artificial Sequence
  BRVp15 Gene Synthesis Oligo BRR1, reverse primer
gggcaatcacattgagcagtggcagagaggccacaccagctccataagacagcaatccc

SEQ ID NO: 300 - DNA, 59 bp, Artificial Sequence
  BRVp15 Gene Synthesis Oligo BRR2, reverse primer
ctttgtagataggggtggctgagataacagaccctggattgtgggcaatcacattgagc

SEQ ID NO: 301 - DNA, 59 bp, Artificial Sequence
  BRVp15 Gene Synthesis Oligo BRR3, reverse primer
ttatctggagcaatcttgagttagggactcctgtgcatggacctttgtagataggggtg

SEQ ID NO: 302 - DNA, 59 bp, Artificial Sequence
  BRVp15 Gene Synthesis Oligo BRR4, reverse primer
atgattaaggattctagtgttctcctctgctgtcccagaagttatctggagcaatcttg

SEQ ID NO: 303 - DNA, 54 bp, Artificial Sequence
  BRVp15 Gene Synthesis Oligo BRR5, reverse primer
cagacattgatgctcccatcagggtttctaccatcatgattaaggattctagtg

SEQ ID NO: 304 - DNA, 25 bp, Artificial Sequence
  BRVp15 Gene Synthesis Oligo BRR6, reverse primer
ggatcctcagacattgatgctccca

SEQ ID NO: 305 - DNA, 59 bp, Artificial Sequence
  zGFP Gene Synthesis Oligo 1F1, forward primer
ctactggcaagctgcctgtgccatggccaactctggtgacaaccctcacctatggagtc

SEQ ID NO: 306 - DNA, 59 bp, Artificial Sequence
  zGFP Gene Synthesis Oligo 1F2, forward primer
ggatgctacctatggcaaactgactctgaagttcatctgcactactggcaagctgcctg

SEQ ID NO: 307 - DNA, 59 bp, Artificial Sequence
  zGFP Gene Synthesis Oligo 1F3, forward primer
gaatgggcacaaattttctgtcagtggagagggagagggggatgctacctatggcaaac

SEQ ID NO: 308 - DNA, 59 bp, Artificial Sequence
  zGFP Gene Synthesis Oligo 1F4, forward primer
aggtgtggtcccaattctggtggagctggatggagatgtgaatgggcacaaattttctg

SEQ ID NO: 309 - DNA, 59 bp, Artificial Sequence
  zGFP Gene Synthesis Oligo 1F5, forward primer
agaccaagaccatggtgagcaagggagaggaactctttacaggtgtggtcccaattctg

SEQ ID NO: 310 - DNA, 20 bp, Artificial Sequence
  zGFP Gene Synthesis Oligo 1F6, forward primer
tagaccaagaccatggtgag

SEQ ID NO: 311 - DNA, 59 bp, Artificial Sequence
  zGFP Gene Synthesis Oligo 2F1, forward primer
gaagaatggcattaaggtcaacttcaagattagacacaacatagaggatggatctgtgc

SEQ ID NO: 312 - DNA, 59 bp, Artificial Sequence
  zGFP Gene Synthesis Oligo 2F2, forward primer
ttacaattcccacaatgtctacattatggctgacaagcagaagaatggcattaaggtca

SEQ ID NO: 313 - DNA, 59 bp, Artificial Sequence
  zGFP Gene Synthesis Oligo 2F3, forward primer
aggaggatggcaacattctgggccataagctggagtataattacaattcccacaatgtc

SEQ ID NO: 314 - DNA, 58 bp, Artificial Sequence
  zGFP Gene Synthesis Oligo 1R1, reverse primer
catgctgtttcatgtggtcaggatatctggaaaagcactggactccataggtgagggt

SEQ ID NO: 315 - DNA, 59 bp, Artificial Sequence
  zGFP Gene Synthesis Oligo 1R2, reverse primer
ctcttgcacatagccctcaggcattgcagatttgaaaaagtcatgctgtttcatgtggt

SEQ ID NO: 316 - DNA, 59 bp, Artificial Sequence
  zGFP Gene Synthesis Oligo 1R3, reverse primer
ctagtcttatagttcccatcatccttgaaaaagatagttctctcttgcacatagccctc

SEQ ID NO: 317 - DNA, 59 bp, Artificial Sequence
  zGFP Gene Synthesis Oligo 1R4, reverse primer
tcctattgaccagggtgtctccttcaaatttcacctcagccctagtcttatagttccca

SEQ ID NO: 318 - DNA, 59 bp, Artificial Sequence
  zGFP Gene Synthesis Oligo 1R5, reverse primer
aatgttgccatcctccttgaagtcaatccccttgagctcaatcctattgaccagggtgt

SEQ ID NO: 319 - DNA, 59 bp, Artificial Sequence
  zGFP Gene Synthesis Oligo 2R1, reverse primer
atccccaataggtgtattctgctggtaatggtcagccagctgcacagatccatcctcta

SEQ ID NO: 320 - DNA, 59 bp, Artificial Sequence
  zGFP Gene Synthesis Oligo 2R2, reverse primer
gggtgctcagatagtgattgtcagggagcagcactggcccatccccaataggtgtattc

SEQ ID NO: 321 - DNA, 53 bp, Artificial Sequence
  zGFP Gene Synthesis Oligo zGFPrev1, reverse primer
gatctctcttttcattaggatctttagacaaagcagattgggtgctcagatag

SEQ ID NO: 322 - DNA, 59 bp, Artificial Sequence
  zGFP Gene Synthesis Oligo zGFPrev2, reverse primer
gtaattcctgcagcagttacaaactccagcagcaccatgtgatctctcttttcattagg

SEQ ID NO: 323 - DNA, 56 bp, Artificial Sequence
  zGFP Gene Synthesis Oligo zGFPrev3, reverse primer
gcggccgcttacttatagagttcatccatacccaaggtaattcctgcagcagttac

SEQ ID NO: 324 - DNA, 59 bp, Artificial Sequence
  Simian Virus 5 F (SV5F) protein Gene Synthesis Oligo SV1F1, forward primer
aaccagctgattcctacaagaaggagaaggagatttgctggagttgtgattgggctggc

SEQ ID NO: 325 - DNA, 59 bp, Artificial Sequence
  Simian Virus 5 F (SV5F) protein Gene Synthesis Oligo SV1F2, forward primer
gctgctccagcccataggggaaaatctggaaactataagaaaccagctgattcctacaa

SEQ ID NO: 326 - DNA, 59 bp, Artificial Sequence
  Simian Virus 5 F (SV5F) protein Gene Synthesis Oligo SV1F3, forward primer
aacattacttcaataagttcctataatgcaactgtgactaagctgctccagcccatagg

SEQ ID NO: 327 - DNA, 59 bp, Artificial Sequence
  Simian Virus 5 F (SV5F) protein Gene Synthesis Oligo SV1F4, forward primer
tgaagctgatgcctactatagacagtcccatctctggctgtaacattacttcaataagt

SEQ ID NO: 328 - DNA, 59 bp, Artificial Sequence
  Simian Virus 5 F (SV5F) protein Gene Synthesis Oligo SV1F5, forward primer
gctcatgtattatacagaagcttcttctgcctttattgttgtgaagctgatgcctacta

SEQ ID NO: 329 - DNA, 59 bp, Artificial Sequence
  Simian Virus 5 F (SV5F) protein Gene Synthesis Oligo SV1F6, forward primer
gccctcatgcagattggggtgattcctaccaatgtcaggcagctcatgtattatacaga

SEQ ID NO: 330 - DNA, 59 bp, Artificial Sequence
  Simian Virus 5 F (SV5F) protein Gene Synthesis Oligo SV1F7, forward primer
gtcagctgtctgctggctggggcaggatctctggaccctgctgccctcatgcagattgg

SEQ ID NO: 331 - DNA, 48 bp, Artificial Sequence
  Simian Virus 5 F (SV5F) protein Gene Synthesis Oligo SV1F8, forward primer
gaccatggggactattattcaatttctggtggtcagctgtctgctggc

SEQ ID NO: 332 - DNA, 32 bp, Artificial Sequence
  Simian Virus 5 F (SV5F) protein Gene Synthesis Oligo SV1F9, forward primer
ggaggaggagctagctagaccatggggactat

SEQ ID NO: 333 - DNA, 59 bp, Artificial Sequence
  Simian Virus 5 F (SV5F) protein Gene Synthesis Oligo SV1R1, reverse primer
ctgcagctgtcacttgtgctgctgtagccacacccagggcagccagcccaatcacaact

SEQ ID NO: 334 - DNA, 59 bp, Artificial Sequence
  Simian Virus 5 F (SV5F) protein Gene Synthesis Oligo SV1R2, reverse primer
caggatggcagctgcattctcatttgctttgaccagggccactgcagctgtcacttgtg

SEQ ID NO: 335 - DNA, 59 bp, Artificial Sequence
  Simian Virus 5 F (SV5F) protein Gene Synthesis Oligo SV1R3, reverse primer
gcaactgcagcattagtcttctggatggcattcttgagattcaggatggcagctgcatt

SEQ ID NO: 336 - DNA, 59 bp, Artificial Sequence
  Simian Virus 5 F (SV5F) protein Gene Synthesis Oligo SV1R4, reverse primer
cactgctgtgcccagagattgtgtggcttgcaccacatcagcaactgcagcattagtct

SEQ ID NO: 337 - DNA, 59 bp, Artificial Sequence
  Simian Virus 5 F (SV5F) protein Gene Synthesis Oligo SV1R5, reverse primer
gctgggctcacaacagagttgatatgatcctgcactgcttgcactgctgtgcccagaga

SEQ ID NO: 338 - DNA, 59 bp, Artificial Sequence
  Simian Virus 5 F (SV5F) protein Gene Synthesis Oligo SV1R6, reverse primer
ccaatgatggcatcttgtgctttacagttggcagctgtaattgctgggctcacaacaga

SEQ ID NO: 339 - DNA, 59 bp, Artificial Sequence
  Simian Virus 5 F (SV5F) protein Gene Synthesis Oligo SV1R7, reverse primer
gattgtggtcagctcagtcagatacagattgagtatgctaccaatgatggcatcttgtg

SEQ ID NO: 340 - DNA, 59 bp, Artificial Sequence
  Simian Virus 5 F (SV5F) protein Gene Synthesis Oligo SV2F1, forward primer
gccactcagattattgatctggcaacaatttcagcctttatcaataaccaggaagtgat

SEQ ID NO: 341 - DNA, 59 bp, Artificial Sequence
  Simian Virus 5 F (SV5F) protein Gene Synthesis Oligo SV2F2, forward primer
tggttatcaagattgaactgcctacactgactgttcagcctgccactcagattattgat

SEQ ID NO: 342 - DNA, 59 bp, Artificial Sequence
  Simian Virus 5 F (SV5F) protein Gene Synthesis Oligo SV2F3, forward primer
gacagggcagattgttgggctggacctcacctacatgcagatggttatcaagattgaac

SEQ ID NO: 343 - DNA, 59 bp, Artificial Sequence
  Simian Virus 5 F (SV5F) protein Gene Synthesis Oligo SV2F4, forward primer
acccagatcagtgcagctgagctgctgtcttctggactcctgacagggcagattgttgg

SEQ ID NO: 344 - DNA, 59 bp, Artificial Sequence
  Simian Virus 5 F (SV5F) protein Gene Synthesis Oligo SV2F5, forward primer
tgggctctacactgcccactgtggttgaaaagagctttaatacccagatcagtgcagct

SEQ ID NO: 345 - DNA, 59 bp, Artificial Sequence
  Simian Virus 5 F (SV5F) protein Gene Synthesis Oligo SV2F6, forward primer
gccctgtctccaattaccatccaggccctcaggatactgctgggctctacactgcccac

SEQ ID NO: 346 - DNA, 59 bp, Artificial Sequence
  Simian Virus 5 F (SV5F) protein Gene Synthesis Oligo SV2F7, forward primer
actgagctgaccacaatctttcacaaccagattaccaacccagccctgtctccaattac

SEQ ID NO: 347 - DNA, 59 bp, Artificial Sequence
  Simian Virus 5 F (SV5F) protein Gene Synthesis Oligo SV2R1, reverse primer
cagactgccagtcaccataacccttgttgggagctgagccatcacttcctggttattga

SEQ ID NO: 348 - DNA, 59 bp, Artificial Sequence
  Simian Virus 5 F (SV5F) protein Gene Synthesis Oligo SV2R2, reverse primer
attgggtgttatggtgcactggctggcagggtatgcctgtatcagactgccagtcacca

SEQ ID NO: 349 - DNA, 59 bp, Artificial Sequence
  Simian Virus 5 F (SV5F) protein Gene Synthesis Oligo SV2R3, reverse primer
atcagacagcacctgggcatcattgtacctgcaatacactgtattgggtgttatggtgc

SEQ ID NO: 350 - DNA, 59 bp, Artificial Sequence
  Simian Virus 5 F (SV5F) protein Gene Synthesis Oligo SV2R4, reverse primer
aagtgcacctagtcagattcccctgcaggcaggccattgtgtcatcagacagcacctgg

SEQ ID NO: 351 - DNA, 59 bp, Artificial Sequence
  Simian Virus 5 F (SV5F) protein Gene Synthesis Oligo SV2R5, reverse primer
acagcacaaacctagtcagaaagctgcccaccactggactaaaagtgcacctagtcaga

SEQ ID NO: 352 - DNA, 59 bp, Artificial Sequence
  Simian Virus 5 F (SV5F) protein Gene Synthesis Oligo SV2R6, reverse primer
tgcagagcatggacctgcagttggcatagactatgccatcaaacagcacaaacctagtc

SEQ ID NO: 353 - DNA, 59 bp, Artificial Sequence
  Simian Virus 5 F (SV5F) protein Gene Synthesis Oligo SV2R7, reverse primer
tgctacttggctgcagaataactgctgcaggctgcatgcatttgcagagcatggacctg

SEQ ID NO: 354 - DNA, 4006 bp, Artificial Sequence
  pCMV/int (CMV-intron; Promega)
tcaatattggccattagccatattattcattggttatatagcataaatcaatattggctattggccattgcatacgttgtatctatatcataatatgtacatttatattggctcatgtccaatatgaccgccatgttggcattgattattgactagttattaatagtaatcaattacggggtcattagttcatagcccatatatggagttccgcgttacataacttacggtaaatggcccgcctggctgaccgcccaacgacccccgcccattgacgtcaataatgacgtatgttcccatagtaacgccaatagggactttccattgacgtcaatgggtggagtatttacggtaaactgcccacttggcagtacatcaagtgtatcatatgccaagtccgccccctattgacgtcaatgacggtaaatggcccgcctggcattatgcccagtacatgaccttacgggactttcctacttggcagtacatctacgtattagtcatcgctattaccatggtgatgcggttttggcagtacaccaatgggcgtggatagcggtttgactcacggggatttccaagtctccaccccattgacgtcaatgggagtttgttttggcaccaaaatcaacgggactttccaaaatgtcgtaataaccccgccccgttgacgcaaatgggcggtaggcgtgtacggtgggaggtctatataagcagagctcgtttagtgaaccgtcagatcactagaagctttattgcggtagtttatcacagttaaattgctaacgcagtcagtgcttctgacacaacagtctcgaacttaagctgcagaagttggtcgtgaggcactgggcaggtaagtatcaaggttacaagacaggtttaaggagaccaatagaaactgggcttgtcgagacagagaagactcttgcgtttctgataggcacctattggtcttactgacatccactttgcctttctctccacaggtgtccactcccagttcaattacagctcttaaggctagagtacttaatacgactcactataggctagcctcgagaattcacgcgtggtacctctagagtcgacccgggcggccgcttcgagcagacatgataagatacattgatgagtttggacaaaccacaactagaatgcagtgaaaaaaatgctttatttgtgaaatttgtgatgctattgctttatttgtaaccattataagctgcaataaacaagttaacaacaacaattgcattcattttatgtttcaggttcagggggagatgtgggaggttttttaaagcaagtaaaacctctacaaatgtggtaaaatcgataaggatccgggctggcgtaatagcgaagaggcccgcaccgatcgcccttcccaacagttgcgcagcctgaatggcgaatggacgcgccctgtagcggcgcattaagcgcggcgggtgtggtggttacgcgcagcgtgaccgctacacttgccagcgccctagcgcccgctcctttcgctttcttcccttcctttctcgccacgttcgccggctttccccgtcaagctctaaatcgggggctccctttagggttccgatttagtgctttacggcacctcgaccccaaaaaacttgattagggtgatggttcacgtagtgggccatcgccctgatagacggtttttcgccctttgacgttggagtccacgttctttaatagtggactcttgttccaaactggaacaacactcaaccctatctcggtctattcttttgatttataagggattttgccgatttcggcctattggttaaaaaatgagctgatttaacaaaaatttaacgcgaattttaacaaaatattaacgcttacaatttcctgatgcggtattttctccttacgcatctgtgcggtatttcacaccgcatatggtgcactctcagtacaatctgctctgatgccgcatagttaagccagccccgacacccgccaacacccgctgacgcgccctgacgggcttgtctgctcccggcatccgcttacagacaagctgtgaccgtctccgggagctgcatgtgtcagaggttttcaccgtcatcaccgaaacgcgcgagacgaaagggcctcgtgatacgcctatttttataggttaatgtcatgataataatggtttcttagacgtcaggtggcacttttcggggaaatgtgcgcggaacccctatttgtttatttttctaaatacattcaaatatgtatccgctcatgagacaataaccctgataaatgcttcaataatattgaaaaaggaagagtatgagtattcaacatttccgtgtcgcccttattcccttttttgcggcattttgccttcctgtttttgctcacccagaaacgctggtgaaagtaaaagatgctgaagatcagttgggtgcacgagtgggttacatcgaactggatctcaacagcggtaagatccttgagagttttcgccccgaagaacgttttccaatgatgagcacttttaaagttctgctatgtggcgcggtattatcccgtattgacgccgggcaagagcaactcggtcgccgcatacactattctcagaatgacttggttgagtactcaccagtcacagaaaagcatcttacggatggcatgacagtaagagaattatgcagtgctgccataaccatgagtgataacactgcggccaacttacttctgacaacgatcggaggaccgaaggagctaaccgcttttttgcacaacatgggggatcatgtaactcgccttgatcgttgggaaccggagctgaatgaagccataccaaacgacgagcgtgacaccacgatgcctgtagcaatggcaacaacgttgcgcaaactattaactggcgaactacttactctagcttcccggcaacaattaatagactggatggaggcggataaagttgcaggaccacttctgcgctcggcccttccggctggctggtttattgctgataaatctggagccggtgagcgtgggtctcgcggtatcattgcagcactggggccagatggtaagccctcccgtatcgtagttatctacacgacggggagtcaggcaactatggatgaacgaaatagacagatcgctgagataggtgcctcactgattaagcattggtaactgtcagaccaagtttactcatatatactttagattgatttaaaacttcatttttaatttaaaaggatctaggtgaagatcctttttgataatctcatgaccaaaatcccttaacgtgagttttcgttccactgagcgtcagaccccgtagaaaagatcaaaggatcttcttgagatcctttttttctgcgcgtaatctgctgcttgcaaacaaaaaaaccaccgctaccagcggtggtttgtttgccggatcaagagctaccaactctttttccgaaggtaactggcttcagcagagcgcagataccaaatactgttcttctagtgtagccgtagttaggccaccacttcaagaactctgtagcaccgcctacatacctcgctctgctaatcctgttaccagtggctgctgccagtggcgataagtcgtgtcttaccgggttggactcaagacgatagttaccggataaggcgcagcggtcgggctgaacggggggttcgtgcacacagcccagcttggagcgaacgacctacaccgaactgagatacctacagcgtgagctatgagaaagcgccacgcttcccgaagggagaaaggcggacaggtatccggtaagcggcagggtcggaacaggagagcgcacgagggagcttccagggggaaacgcctggtatctttatagtcctgtcgggtttcgccacctctgacttgagcgtcgatttttgtgatgctcgtcaggggggcggagcctatggaaaaacgccagcaacgcggcctttttacggttcctggccttttgctggccttttgctcacatggctcgacagatct

SEQ ID NO: 355 - DNA, 59 bp, Artificial Sequence
  Simian Virus 5 F (SV5F) protein Gene Synthesis Oligo SV3F2, forward primer
aactggagtcaagtcagattctgagcattgaccctctggatatctcccagaatctggct

SEQ ID NO: 356 - DNA, 56 bp, Artificial Sequence
  Simian Virus 5 F (SV5F) protein Gene Synthesis Oligo SV3F3, forward primer
cactcagctggcaaatgttacttacaactcaactattaaactggagtcaagtcaga

SEQ ID NO: 357 - DNA, 59 bp, Artificial Sequence
  Simian Virus 5 F (SV5F) protein Gene Synthesis Oligo SV3F4, forward primer
taagtgtgtttctctgcaactggacaacctgaggttcaccatcactcagctggcaaatg

SEQ ID NO: 358 - DNA, 59 bp, Artificial Sequence
  Simian Virus 5 F (SV5F) protein Gene Synthesis Oligo SV3F5, forward primer
tctgcagccaagtagcagtccagtgacagtgatagacatgtataagtgtgtttctctgc

SEQ ID NO: 359 - DNA, 57 bp, Artificial Sequence
  Simian Virus 5 F (SV5F) protein Gene Synthesis Oligo SV3R1, reverse primer
gccagatgttggagtgcatcactgaggctcttattcactgcagccagattctgggag

SEQ ID NO: 360 - DNA, 59 bp, Artificial Sequence
  Simian Virus 5 F (SV5F) protein Gene Synthesis Oligo SV3R2, reverse primer
ggtagttgcagaggtaatggctgagagataggtgtctgactgggccagatgttggagtg

SEQ ID NO: 361 - DNA, 59 bp, Artificial Sequence
  Simian Virus 5 F (SV5F) protein Gene Synthesis Oligo SV3R3, reverse primer
ccagtgatcccagacatatagctataatgctcaggactgaggtggtagttgcagaggta

SEQ ID NO: 362 - DNA, 59 bp, Artificial Sequence
  Simian Virus 5 F (SV5F) protein Gene Synthesis Oligo SV3R4, reverse primer
agcttccacaccacaacactcagcagtatgatcagaatcaggcccagtgatcccagaca

SEQ ID NO: 363 - DNA, 59 bp, Artificial Sequence
  Simian Virus 5 F (SV5F) protein Gene Synthesis Oligo SV3R5, reverse primer
aaattttccatcctattcctgttggccaccacaattgtcagcagcttccacaccacaac

SEQ ID NO: 364 - DNA, 48 bp, Artificial Sequence
  Simian Virus 5 F (SV5F) protein Gene Synthesis Oligo SV3R6, reverse primer
ggaggattggatccctatttgtggtacacaaaattttccatcctattc

SEQ ID NO: 365 - DNA, 59 bp, Artificial Sequence
  Polyoma Virus 40 Large T Antigen protein, SV40 TAg protein Gene Synthesis Oligo 1F1, forward primer
ttgggatgccacagagatacctacttatggtacagatgagtgggaacagtggtggaatg

SEQ ID NO: 366 - DNA, 59 bp, Artificial Sequence
  Polyoma Virus 40 Large T Antigen protein, SV40 TAg protein Gene Synthesis Oligo 1F2, forward primer
aagatggtgtaaagtatgctcaccagccagattttggaggtttttgggatgccacagag

SEQ ID NO: 367 - DNA, 59 bp, Artificial Sequence
  Polyoma Virus 40 Large T Antigen protein, SV40 TAg protein Gene Synthesis Oligo 1F3, forward primer
gaagagaagatgaaaaagatgaacacactgtataagaaaatggaagatggtgtaaagta

SEQ ID NO: 368 - DNA, 59 bp, Artificial Sequence
  Polyoma Virus 40 Large T Antigen protein, SV40 TAg protein Gene Synthesis Oligo 1F4, forward primer
tgaagaagtgtaaagagttccatcctgacaaaggtggagatgaagagaagatgaaaaag

SEQ ID NO: 369 - DNA, 59 bp, Artificial Sequence
  Polyoma Virus 40 Large T Antigen protein, SV40 TAg protein Gene Synthesis Oligo 1F5, forward primer
ggtctgcatggggtaatatcccacttatgaggaaagcatacctgaagaagtgtaaagag

SEQ ID NO: 370 - DNA, 59 bp, Artificial Sequence
  Polyoma Virus 40 Large T Antigen protein, SV40 TAg protein Gene Synthesis Oligo 1F6, forward primer
gggaggaaagtctgcaactgatggatctgttgggacttgagaggtctgcatggggtaat

SEQ ID NO: 371 - DNA, 49 bp, Artificial Sequence
  Polyoma Virus 40 Large T Antigen protein, SV40 TAg protein Gene Synthesis Oligo 1F7, forward primer
gctagccacaaccatggacaaagtgctgaatagggaggaaagtctgcaa

SEQ ID NO: 372 - DNA, 59 bp, Artificial Sequence
  Polyoma Virus 40 Large T Antigen protein, SV40 TAg protein Gene Synthesis Oligo 1R1, reverse primer
ctaggcatttcctcagagcaaaacaaattctcttcattaaatgcattccaccactgttc

SEQ ID NO: 373 - DNA, 59 bp, Artificial Sequence
  Polyoma Virus 40 Large T Antigen protein, SV40 TAg protein Gene Synthesis Oligo 1R2, reverse primer
gtggagtactgtgctgggagtcagctgtggcctcatcatcagaactaggcatttcctca

SEQ ID NO: 374 - DNA, 59 bp, Artificial Sequence
  Polyoma Virus 40 Large T Antigen protein, SV40 TAg protein Gene Synthesis Oligo 1R3, reverse primer
gaggggaaatcctttgggtcttccacttttctctttttcttgggtggagtactgtgctg

SEQ ID NO: 375 - DNA, 59 bp, Artificial Sequence
  Polyoma Virus 40 Large T Antigen protein, SV40 TAg protein Gene Synthesis Oligo 1R4, reverse primer
cctatttgagaacactgcatgagacaagaaggacaagagttcagaggggaaatcctttg

SEQ ID NO: 376 - DNA, 59 bp, Artificial Sequence
  Polyoma Virus 40 Large T Antigen protein, SV40 TAg protein Gene Synthesis Oligo 1R5, reverse primer
tgccttctccttagtagtgtagatagcaaagcaagccagggtcctatttgagaacactg

SEQ ID NO: 377 - DNA, 59 bp, Artificial Sequence
  Polyoma Virus 40 Large T Antigen protein, SV40 TAg protein Gene Synthesis Oligo 1R6, reverse primer
ggtgacagaatacttttccatgattttcttgtacaagagagctgccttctccttagtag

SEQ ID NO: 378 - DNA, 59 bp, Artificial Sequence
  Polyoma Virus 40 Large T Antigen protein, SV40 TAg protein Gene Synthesis Oligo 1R7, reverse primer
aagagaatattatgattataggagttgtgcctggaaataaaggtgacagaatacttttc

SEQ ID NO: 379 - DNA, 59 bp, Artificial Sequence
  Polyoma Virus 40 Large T Antigen protein, SV40 TAg protein Gene Synthesis Oligo 2F1, forward primer
tgtgactgaatatgcaatggagacaaagtgtgatgatgtcctgctcctcctgggaatgt

SEQ ID NO: 380 - DNA, 59 bp, Artificial Sequence
  Polyoma Virus 40 Large T Antigen protein, SV40 TAg protein Gene Synthesis Oligo 2F2, forward primer
cccagaagaggctgaagaaacaaaacaggtgagctggaagcttgtgactgaatatgcaa

SEQ ID NO: 381 - DNA, 59 bp, Artificial Sequence
  Polyoma Virus 40 Large T Antigen protein, SV40 TAg protein Gene Synthesis Oligo 2F3, forward primer
tgaagaatccctgcctggtgggctcaaggagcatgatttcaacccagaagaggctgaag

SEQ ID NO: 382 - DNA, 59 bp, Artificial Sequence
  Polyoma Virus 40 Large T Antigen protein, SV40 TAg protein Gene Synthesis Oligo 2F4, forward primer
tctcatgtattcagccctgaccagagacccctttagtgtgattgaagaatccctgcctg

SEQ ID NO: 383 - DNA, 59 bp, Artificial Sequence
  Polyoma Virus 40 Large T Antigen protein, SV40 TAg protein Gene Synthesis Oligo 2F5, forward primer
gtactttctccttcctgatctgtaagggtgtgaataaggagtatctcatgtattcagcc

SEQ ID NO: 384 - DNA, 59 bp, Artificial Sequence
  Polyoma Virus 40 Large T Antigen protein, SV40 TAg protein Gene Synthesis Oligo 2F6, forward primer
ggcatagggtgagtgcaattaacaactatgctcagaagttgtgtactttctccttcctg

SEQ ID NO: 385 - DNA, 59 bp, Artificial Sequence
  Polyoma Virus 40 Large T Antigen protein, SV40 TAg protein Gene Synthesis Oligo 2F7, forward primer
ctcctataatcataatattctctttttcttgacaccccataggcatagggtgagtgcaa

SEQ ID NO: 386 - DNA, 59 bp, Artificial Sequence
  Polyoma Virus 40 Large T Antigen protein, SV40 TAg protein Gene Synthesis Oligo 2R1, reverse primer
tacatttcagacacatttcaaagctatactgaaattccaggtacattcccaggaggagc

SEQ ID NO: 387 - DNA, 59 bp, Artificial Sequence
  Polyoma Virus 40 Large T Antigen protein, SV40 TAg protein Gene Synthesis Oligo 2R2, reverse primer
gcttttcatgatacttataatgagaaggctgttcctttttgatacatttcagacacatt

SEQ ID NO: 388 - DNA, 59 bp, Artificial Sequence
  Polyoma Virus 40 Large T Antigen protein, SV40 TAg protein Gene Synthesis Oligo 2R3, reverse primer
ctggtttttagaatctgcaaatatagctgcattggcatagtgcttttcatgatacttat

SEQ ID NO: 389 - DNA, 59 bp, Artificial Sequence
  Polyoma Virus 40 Large T Antigen protein, SV40 TAg protein Gene Synthesis Oligo 2R4, reverse primer
cttggccagaactgtgtcaacagcttgctgacaaatggttttctggtttttagaatctg

SEQ ID NO: 390 - DNA, 59 bp, Artificial Sequence
  Polyoma Virus 40 Large T Antigen protein, SV40 TAg protein Gene Synthesis Oligo 2R5, reverse primer
aacatctgctccctggtaagctggagagagtctactcttttcttggccagaactgtgtc

SEQ ID NO: 391 - DNA, 52 bp, Artificial Sequence
  Polyoma Virus 40 Large T Antigen protein, SV40 TAg protein Gene Synthesis Oligo 2R6, reverse primer
ccattctgtccagaaggtcattgaacctatttgtcaacatctgctccctggt

SEQ ID NO: 392 - DNA, 52 bp, Artificial Sequence
  Polyoma Virus 40 Large T Antigen protein, SV40 TAg protein Gene Synthesis Oligo 2R7, reverse primer
atctgcagatccagttgagccaaacattatgtccattctgtccagaaggtca

SEQ ID NO: 393 - DNA, 59 bp, Artificial Sequence
  Polyoma Virus 40 Large T Antigen protein, SV40 TAg protein Gene Synthesis Oligo 3F1, forward primer
acctgccacttgatagactcaactttgagctgggggtggcaattgatcagtttttggta

SEQ ID NO: 394 - DNA, 59 bp, Artificial Sequence
  Polyoma Virus 40 Large T Antigen protein, SV40 TAg protein Gene Synthesis Oligo 3F2, forward primer
gctgcacttctggaactctgtggtgggaaagctctcaatgtcaacctgccacttgatag

SEQ ID NO: 395 - DNA, 59 bp, Artificial Sequence
  Polyoma Virus 40 Large T Antigen protein, SV40 TAg protein Gene Synthesis Oligo 3F3, forward primer
gttgttcaagggacccattgattcagggaaaactacccttgctgctgcacttctggaac

SEQ ID NO: 396 - DNA, 59 bp, Artificial Sequence
  Polyoma Virus 40 Large T Antigen protein, SV40 TAg protein Gene Synthesis Oligo 3F4, forward primer
ttccttaagtgtatggtctataatatccctaaaaagagatactggttgttcaagggacc

SEQ ID NO: 397 - DNA, 59 bp, Artificial Sequence
  Polyoma Virus 40 Large T Antigen protein, SV40 TAg protein Gene Synthesis Oligo 3F5, forward primer
ctgcactgtctcctccctaaaatggacagtgtagtctatgacttccttaagtgtatggt

SEQ ID NO: 398 - DNA, 44 bp, Artificial Sequence
  Polyoma Virus 40 Large T Antigen protein, SV40 TAg protein Gene Synthesis Oligo 3F6, forward primer
ggagtggatggctggagtggcctggctgcactgtctcctcccta

SEQ ID NO: 399 - DNA, 43 bp, Artificial Sequence
  Polyoma Virus 40 Large T Antigen protein, SV40 TAg protein Gene Synthesis Oligo 3F7, forward primer
ggctcaactggatctgcagatatagaggagtggatggctggag

SEQ ID NO: 400 - DNA, 59 bp, Artificial Sequence
  Polyoma Virus 40 Large T Antigen protein, SV40 TAg protein Gene Synthesis Oligo 3R1, reverse primer
atccctggactctcctcctgtacctttcacatcttcaaacactaccaaaaactgatcaa

SEQ ID NO: 401 - DNA, 59 bp, Artificial Sequence
  Polyoma Virus 40 Large T Antigen protein, SV40 TAg protein Gene Synthesis Oligo 3R2, reverse primer
ctctgaggttgtccagattgttgatgccttggccactaggcaaatccctggactctcct

SEQ ID NO: 402 - DNA, 59 bp, Artificial Sequence
  Polyoma Virus 40 Large T Antigen protein, SV40 TAg protein Gene Synthesis Oligo 3R3, reverse primer
tgctttttttcaaggttgacctttacagacccatccaggtagtctctgaggttgtccag

SEQ ID NO: 403 - DNA, 59 bp, Artificial Sequence
  Polyoma Virus 40 Large T Antigen protein, SV40 TAg protein Gene Synthesis Oligo 3R4, reverse primer
tgactattccaggtggaaatatttgagtcctcttgttgagatgctttttttcaaggttg

SEQ ID NO: 404 - DNA, 59 bp, Artificial Sequence
  Polyoma Virus 40 Large T Antigen protein, SV40 TAg protein Gene Synthesis Oligo 3R5, reverse primer
aatctagcctggagggtcttgggcactgaatattcattcatagtgactattccaggtgg

SEQ ID NO: 405 - DNA, 59 bp, Artificial Sequence
  Polyoma Virus 40 Large T Antigen protein, SV40 TAg protein Gene Synthesis Oligo 3R6, reverse primer
gtttcagataatctttaggtctgaaatcaatttgcttgacaaatctagcctggagggtc

SEQ ID NO: 406 - DNA, 43 bp, Artificial Sequence
  Polyoma Virus 40 Large T Antigen protein, SV40 TAg protein Gene Synthesis Oligo 3R7, reverse primer
aggaactcactcctctccaaacaatgtttcagataatctttag

SEQ ID NO: 407 - DNA, 59 bp, Artificial Sequence
  Polyoma Virus 40 Large T Antigen protein, SV40 TAg protein Gene Synthesis Oligo 4F1, forward primer
agtgcttgattggttgagaaacagtgatgatgatgatgaagattctcaggaaaatgctg

SEQ ID NO: 408 - DNA, 59 bp, Artificial Sequence
  Polyoma Virus 40 Large T Antigen protein, SV40 TAg protein Gene Synthesis Oligo 4F2, forward primer
cagtatatcaaaagatgaagttcaatgtggctatgggtattggagtgcttgattggttg

SEQ ID NO: 409 - DNA, 59 bp, Artificial Sequence
  Polyoma Virus 40 Large T Antigen protein, SV40 TAg protein Gene Synthesis Oligo 4F3, forward primer
tagttgagtggaaagaaaggcttgacaaggagttttctctttcagtatatcaaaagatg

SEQ ID NO: 410 - DNA, 59 bp, Artificial Sequence
  Polyoma Virus 40 Large T Antigen protein, SV40 TAg protein Gene Synthesis Oligo 4F4, forward primer
atagaccagtggctgagtttgcccaaagcattcagagtagaatagttgagtggaaagaa

SEQ ID NO: 411 - DNA, 59 bp, Artificial Sequence
  Polyoma Virus 40 Large T Antigen protein, SV40 TAg protein Gene Synthesis Oligo 4F5, forward primer
ttattcagtcaggaatagcactgcttcttatgctgatatggtatagaccagtggctgag

SEQ ID NO: 412 - DNA, 52 bp, Artificial Sequence
  Polyoma Virus 40 Large T Antigen protein, SV40 TAg protein Gene Synthesis Oligo 4F6, forward primer
ttggagaggagtgagttcctccttgagaaaaggattattcagtcaggaatag

SEQ ID NO: 413 - DNA, 59 bp, Artificial Sequence
  Polyoma Virus 40 Large T Antigen protein, SV40 TAg protein Gene Synthesis Oligo 4R1, reverse primer
ccagaatcttccatattcttctctcccccatcctcatttttatcagcattttcctgaga

SEQ ID NO: 414 - DNA, 59 bp, Artificial Sequence
  Polyoma Virus 40 Large T Antigen protein, SV40 TAg protein Gene Synthesis Oligo 4R2, reverse primer
ggaaactcccctggctctgactatcaatgccagtttcatgaccagaatcttccatattc

SEQ ID NO: 415 - DNA, 59 bp, Artificial Sequence
  Polyoma Virus 40 Large T Antigen protein, SV40 TAg protein Gene Synthesis Oligo 4R3, reverse primer
ggctggttgtggtcatggacactttgggagctctgtggagcctggaaactcccctggct

SEQ ID NO: 416 - DNA, 59 bp, Artificial Sequence
  Polyoma Virus 40 Large T Antigen protein, SV40 TAg protein Gene Synthesis Oligo 4R4, reverse primer
gggaggtttcttgaaacaagtaaaacctctgcatatatggtaaggctggttgtggtcat

SEQ ID NO: 417 - DNA, 44 bp, Artificial Sequence
  Polyoma Virus 40 Large T Antigen protein, SV40 TAg protein Gene Synthesis Oligo 4R5, reverse primer
tcatgtttcaggttctggagggggagtgggaggtttcttgaaac

SEQ ID NO: 418 - DNA, 32 bp, Artificial Sequence
  Polyoma Virus 40 Large T Antigen protein, SV40 TAg protein Gene Synthesis Oligo 4R6, reverse primer
ggatccagcggccgctcatgtttcaggttctg

SEQ ID NO: 419 - DNA, 59 bp, Artificial Sequence
  Vesicular stromatitis virus protein G, VSV-G protein Gene Synthesis Oligo 1F1, forward primer
gtatattacacagtctatcagatcattcacaccctctgtggagcagtgtaaggaaagta

SEQ ID NO: 420 - DNA, 59 bp, Artificial Sequence
  Vesicular stromatitis virus protein G, VSV-G protein Gene Synthesis Oligo 1F2, forward primer
agtgggtgaccacctgtgatttcaggtggtatggacctaagtatattacacagtctatc

SEQ ID NO: 421 - DNA, 59 bp, Artificial Sequence
  Vesicular stromatitis virus protein G, VSV-G protein Gene Synthesis Oligo 1F3, forward primer
cacaaggctattcaagctgatggctggatgtgtcatgcctctaagtgggtgaccacctg

SEQ ID NO: 422 - DNA, 59 bp, Artificial Sequence
  Vesicular stromatitis virus protein G, VSV-G protein Gene Synthesis Oligo 1F4, forward primer
gacctgattggcacagccattcaggtgaaaatgcctaaaagtcacaaggctattcaagc

SEQ ID NO: 423 - DNA, 59 bp, Artificial Sequence
  Vesicular stromatitis virus protein G, VSV-G protein Gene Synthesis Oligo 1F5, forward primer
ttaccactattgtcccagctcctctgatctcaattggcataatgacctgattggcacag

SEQ ID NO: 424 - DNA, 59 bp, Artificial Sequence
  Vesicular stromatitis virus protein G, VSV-G protein Gene Synthesis Oligo 1F6, forward primer
ccctcacaaccagaagggaaattggaagaatgtgcccagcaattaccactattgtccca

SEQ ID NO: 425 - DNA, 59 bp, Artificial Sequence
  Vesicular stromatitis virus protein G, VSV-G protein Gene Synthesis Oligo 1F7, forward primer
tttcctgtttataggggttaattgtaagtttactattgtcttccctcacaaccagaagg

SEQ ID NO: 426 - DNA, 53 bp, Artificial Sequence
  Vesicular stromatitis virus protein G, VSV-G protein Gene Synthesis Oligo 1F8, forward primer
gctagctagaccatgaaatgtctgctctacctggctttcctgtttataggggt

SEQ ID NO: 427 - DNA, 59 bp, Artificial Sequence
  Vesicular stromatitis virus protein G, VSV-G protein Gene Synthesis Oligo 1R1, reverse primer
aaagcctgggttgagccaagtcccctgttttgtctgctcaatactttccttacactgct

SEQ ID NO: 428 - DNA, 59 bp, Artificial Sequence
  Vesicular stromatitis virus protein G, VSV-G protein Gene Synthesis Oligo 1R2, reverse primer
cctctgcatctgtcactgtagcataaccacagctctgaggtggaaagcctgggttgagc

SEQ ID NO: 429 - DNA, 59 bp, Artificial Sequence
  Vesicular stromatitis virus protein G, VSV-G protein Gene Synthesis Oligo 1R3, reverse primer
tcatccaccagcacatggtgaggagtgacctgaacaatcactgcctctgcatctgtcac

SEQ ID NO: 430 - DNA, 59 bp, Artificial Sequence
  Vesicular stromatitis virus protein G, VSV-G protein Gene Synthesis Oligo 1R4, reverse primer
cttgccattaatgaactggctgtcaacccattcaccagtgtactcatccaccagcacat

SEQ ID NO: 431 - DNA, 59 bp, Artificial Sequence
  Vesicular stromatitis virus protein G, VSV-G protein Gene Synthesis Oligo 1R5, reverse primer
tgttgtactgttatgcacagtagggcagatgtaattggagcacttgccattaatgaact

SEQ ID NO: 432 - DNA, 49 bp, Artificial Sequence
  Vesicular stromatitis virus protein G, VSV-G protein Gene Synthesis Oligo 1R6, reverse primer
cagaggcccttaactttgtaatcactgtgccatgttgtactgttatgca

SEQ ID NO: 433 - DNA, 59 bp, Artificial Sequence
  Vesicular stromatitis virus protein G, VSV-G protein Gene Synthesis Oligo 2F1, forward primer
ggcagacaaagacctctttgcagctgccaggtttcctgagtgtccagagggctcctcca

SEQ ID NO: 434 - DNA, 59 bp, Artificial Sequence
  Vesicular stromatitis virus protein G, VSV-G protein Gene Synthesis Oligo 2F2, forward primer
aacactggggtgtcagactgccatcaggtgtgtggtttgaaatggcagacaaagacctc

SEQ ID NO: 435 - DNA, 59 bp, Artificial Sequence
  Vesicular stromatitis virus protein G, VSV-G protein Gene Synthesis Oligo 2F3, forward primer
gcatatgagacaggtggaaaagcctgtaagatgcagtattgcaaacactggggtgtcag

SEQ ID NO: 436 - DNA, 59 bp, Artificial Sequence
  Vesicular stromatitis virus protein G, VSV-G protein Gene Synthesis Oligo 2F4, forward primer
aagtctgggtaaagagggaactgggttcaggagcaattactttgcatatgagacaggtg

SEQ ID NO: 437 - DNA, 59 bp, Artificial Sequence
  Vesicular stromatitis virus protein G, VSV-G protein Gene Synthesis Oligo 2F5, forward primer
cagcatggatatcaccttcttctctgaagatggagaactgtcaagtctgggtaaagagg

SEQ ID NO: 438 - DNA, 49 bp, Artificial Sequence
  Vesicular stromatitis virus protein G, VSV-G protein Gene Synthesis Oligo 2F6, forward primer
caaagttaagggcctctgtgattccaacctcatcagcatggatatcacc

SEQ ID NO: 439 - DNA, 59 bp, Artificial Sequence
  Vesicular stromatitis virus protein G, VSV-G protein Gene Synthesis Oligo 2R1, reverse primer
cagagggctcctccattagtgctccaagccaaacatctgttgatgtctcactgattcag

SEQ ID NO: 440 - DNA, 59 bp, Artificial Sequence
  Vesicular stromatitis virus protein G, VSV-G protein Gene Synthesis Oligo 2R2, reverse primer
ggtttcctgacacagactgtaatccaggattctttccacatcctgaatcagtgagacat

SEQ ID NO: 441 - DNA, 59 bp, Artificial Sequence
  Vesicular stromatitis virus protein G, VSV-G protein Gene Synthesis Oligo 2R3, reverse primer
atccacaggtgagatagggagaccagctctaatcttactccaggtttcctgacacagac

SEQ ID NO: 442 - DNA, 59 bp, Artificial Sequence
  Vesicular stromatitis virus protein G, VSV-G protein Gene Synthesis Oligo 2R4, reverse primer
ggcagggcctgtcccaggattctttggagccagatagctcagatccacaggtgagatag

SEQ ID NO: 443 - DNA, 59 bp, Artificial Sequence
  Vesicular stromatitis virus protein G, VSV-G protein Gene Synthesis Oligo 2R5, reverse primer
atatctagtctcaaagtacttgagagttccattgataattgtaaaggcagggcctgtcc

SEQ ID NO: 444 - DNA, 59 bp, Artificial Sequence
  Vesicular stromatitis virus protein G, VSV-G protein Gene Synthesis Oligo 2R6, reverse primer
ccattcttgacaggattggagctgctatgtcaaccctgatatatctagtctcaaagtac

SEQ ID NO: 445 - DNA, 45 bp, Artificial Sequence
  Vesicular stromatitis virus protein G, VSV-G protein Gene Synthesis Oligo 2R7, reverse primer
ctgttgtggtacctgagatcatccccaccattcttgacaggattg

SEQ ID NO: 446 - DNA, 59 bp, Artificial Sequence
  Vesicular stromatitis virus protein G, VSV-G protein Gene Synthesis Oligo 3F1, forward primer
ttccaaagcacaagtgtttgagcacccccacatccaggatgctgcatcccagctgcctg

SEQ ID NO: 447 - DNA, 59 bp, Artificial Sequence
  Vesicular stromatitis virus protein G, VSV-G protein Gene Synthesis Oligo 3F2, forward primer
atgattggtcatggaatgctggactcagacctgcacctcagttccaaagcacaagtgtt

SEQ ID NO: 448 - DNA, 59 bp, Artificial Sequence
  Vesicular stromatitis virus protein G, VSV-G protein Gene Synthesis Oligo 3F3, forward primer
gggtgctgaggacctcctcaggctataagttcccactctatatgattggtcatggaatg

SEQ ID NO: 449 - DNA, 59 bp, Artificial Sequence
  Vesicular stromatitis virus protein G, VSV-G protein Gene Synthesis Oligo 3F4, forward primer
gggatgactgggctccttatgaggatgtggagattggacctaatggggtgctgaggacc

SEQ ID NO: 450 - DNA, 46 bp, Artificial Sequence
  Vesicular stromatitis virus protein G, VSV-G protein Gene Synthesis Oligo 3F5, forward primer
tctcaggtaccacaacagaaagagaactgtgggatgactgggctcc

SEQ ID NO: 451 - DNA, 59 bp, Artificial Sequence
  Vesicular stromatitis virus protein G, VSV-G protein Gene Synthesis Oligo 3R1, reverse primer
gttcttactcagccctgtatctccaaagaacaggctctcatcatcaggcagctgggatg

SEQ ID NO: 452 - DNA, 59 bp, Artificial Sequence
  Vesicular stromatitis virus protein G, VSV-G protein Gene Synthesis Oligo 3R2, reverse primer
acttttccaagaagagaaccatccctccaccagttcaatagggttcttactcagccctg

SEQ ID NO: 453 - DNA, 59 bp, Artificial Sequence
  Vesicular stromatitis virus protein G, VSV-G protein Gene Synthesis Oligo 3R3, reverse primer
caatgatcaggcctataatgaaaaagaaggaggcaatagaacttttccaagaagagaac

SEQ ID NO: 454 - DNA, 59 bp, Artificial Sequence
  Vesicular stromatitis virus protein G, VSV-G protein Gene Synthesis Oligo 3R4, reverse primer
tacacagatgaatcccaactctcagcaccagaaagagtccaatgatcaggcctataatg

SEQ ID NO: 455 - DNA, 57 bp, Artificial Sequence
  Vesicular stromatitis virus protein G, VSV-G protein Gene Synthesis Oligo 3R5, reverse primer
tctgtgtagatctgtctctttttggtgtgtttcagcttgatacacagatgaatccca

SEQ ID NO: 456 - DNA, 52 bp, Artificial Sequence
  Vesicular stromatitis virus protein G, VSV-G protein Gene Synthesis Oligo 3R6, reverse primer
ggatccttacttccccagcctgttcatctcaatatctgtgtagatctgtctc

SEQ ID NO: 457 - DNA, 32 bp, Artificial Sequence
  Luc-BamHI reverse PCR primer
aaggatccttacaatttggactttccgccctt

SEQ ID NO: 458 - DNA, 32 bp, Artificial Sequence
  NheI-zLuc forward PCR primer
gctagctagaccatggaggatgcaaagaacat

SEQ ID NO: 459 - DNA, 26 bp, Artificial Sequence
  BamHI-zLuc reverse PCR primer
ggatcctcattacaatttgctcttgc

SEQ ID NO: 460 - DNA, 39 bp, Artificial Sequence
  Luc-NheI forward PCR primer
ttgctagctggtaacatggaagacgccaaaaacataaag

SEQ ID NO: 461 - DNA, 21 bp, Artificial Sequence
  TAg-1786 forward sequencing primer
atagttgagtggaaagaaagg

SEQ ID NO: 462 - DNA, 21 bp, Artificial Sequence
  CMV forward sequencing primer (for sequencing gene in 1st position from 5' end)
gtaggcgtgtacggtgggagg

SEQ ID NO: 463 - DNA, 21 bp, Artificial Sequence
  IRES forward sequencing primer (for sequencing gene in 2nd position from 5' end)
gaggttaaaaaaacgtctagg

SEQ ID NO: 464 - DNA, 20 bp, Artificial Sequence
  IRES reverse sequencing primer (for sequencing gene in 1st position from 3' end)
catatagacaaacgcacacc

SEQ ID NO: 465 - DNA, 21 bp, Artificial Sequence
  SV40pA reverse sequencing primer (for sequencing gene in 2nd position from 3' end)
tttcaggttcagggggaggtg

SEQ ID NO: 466 - DNA, 1950 bp, Artificial Sequence
  pCpG Backbone Vector
ggaattcagtcaatatgttcaccccaaaaaagctgtttgttaacttgtcaacctcattctaaaatgtatatagaagcccaaaagacaataacaaaaatattcttgtagaacaaaatgggaaagaatgttccactaaatatcaagatttagagcaaagcatgagatgtgtggggatagacagtgaggctgataaaatagagtagagctcagaaacagacccattgatatatgtaagtgacctatgaaaaaaatatggcattttacaatgggaaaatgatgatctttttcttttttagaaaaacagggaaatatatttatatgtaaaaaataaaagggaacccatatgtcataccatacacacaaaaaaattccagtgaattataagtctaaatggagaaggcaaaactttaaatcttttagaaaataatatagaagcatgccatcaagacttcagtgtagagaaaaatttcttatgactcaaagtcctaaccacaaagaaaagattgttaattagattgcatgaatattaagacttatttttaaaattaaaaaaccattaagaaaagtcaggccatagaatgacagaaaatatttgcaacaccccagtaaagagaattgtaatatgcagattataaaaagaagtcttacaaatcagtaaaaaataaaactagacaaaaatttgaacagatgaaagagaaactctaaataatcattacacatgagaaactcaatctcagaaatcagagaactatcattgcatatacactaaattagagaaatattaaaaggctaagtaacatctgtggcttaattaaaacagtagttgacaattaaacattggcatagtatatctgcatagtataatacaactcactataggagggccatcatggccaagttgaccagtgctgtcccagtgctcacagccagggatgtggctggagctgttgagttctggactgacaggttggggttctccagagattttgtggaggatgactttgcaggtgtggtcagagatgatgtcaccctgttcatctcagcagtccaggaccaggtggtgcctgacaacaccctggcttgggtgtgggtgagaggactggatgagctgtatgctgagtggagtgaggtggtctccaccaacttcagggatgccagtggccctgccatgacagagattggagagcagccctgggggagagagtttgccctgagagacccagcaggcaactgtgtgcactttgtggcagaggagcaggactgaggataacctaggaaaccttaaaacctttaaaagccttatatattcttttttttcttataaaacttaaaaccttagaggctatttaagttgctgatttatattaattttattgttcaaacatgagagcttagtacatgaaacatgagagcttagtacattagccatgagagcttagtacattagccatgagggtttagttcattaaacatgagagcttagtacattaaacatgagagcttagtacatactatcaacaggttgaactgctgatcttaattaaaattatctctaaggcatgtgaactggctgtcttggttttcatctgtacttcatctgctacctctgtgacctgaaacatatttataattccattaagctgtgcatatgatagatttatcatatgtattttccttaaaggatttttgtaagaactaattgaattgatacctgtaaagtctttatcacactacccaataaataataaatctctttgttcagctctctgtttctataaatatgtaccagttttattgtttttagtggtagtgattttattctctttctatatatatacacacacatgtgtgcattcataaatatatacaatttttatgaataaaaaattattagcaatcaatattgaaaaccactgatttttgtttatgtgagcaaacagcagattaaaa

SEQ ID NO: 467 - DNA, 21 bp, Artificial Sequence
  TAg494 forward sequencing primer
ctttgctatctacactactaa

SEQ ID NO: 468 - DNA, 19 bp, Artificial Sequence
  TAg1125 forward sequencing primer
ggacagaatggacataatg

SEQ ID NO: 469 - DNA, 4712 bp, Artificial Sequence
  pMaxGFP (Lonza)
tagttattaatagtaatcaattacggggtcattagttcatagcccatatatggagttccgcgttacataacttacggtaaatggcccgcctggctgaccgcccaacgacccccgcccattgacgtcaataatgacgtatgttcccatagtaacgccaatagggactttccattgacgtcaatgggtggagtatttacggtaaactgcccacttggcagtacatcaagtgtatcatatgccaagtacgccccctattgacgtcaatgacggtaaatggcccgcctggcattatgcccagtacatgaccttatgggactttcctacttggcagtacatctacgtattagtcatcgctattaccatggtgatgcggttttggcagtacatcaatgggcgtggatagcggtttgactcacggggatttccaagtctccaccccattgacgtcaatgggagtttgttttggcaccaaaatcaacgggactttccaaaatgtcgtaacaactccgccccattgacgcaaatgggcggtaggcgtgtacggtgggaggtctatataagcagagctggtttagtgaaccgtcagatccgctagcgctaccggactcagatctcgagctcaagcttcgaattctgcagtcgacggtaccgcgggcccgggatccaccggtcgccaccatggagagcgacgagagcggcctgcccgccatggagatcgagtgccgcatcaccggcaccctgaacggcgtggagttcgagctggtgggcggcggagagggcacccccgagcagggccgcatgaccaacaagatgaagagcaccaaaggcgccctgaccttcagcccctacctgctgagccacgtgatgggctacggcttctaccacttcggcacctaccccagcggctacgagaaccccttcctgcacgccatcaacaacggcggctacaccaacacccgcatcgagaagtacgaggacggcggcgtgctgcacgtgagcttcagctaccgctacgaggccggccgcgtgatcggcgacttcaaggtgatgggcaccggcttccccgaggacagcgtgatcttcaccgacaagatcatccgcagcaacgccaccgtggagcacctgcaccccatgggcgataacgatctggatggcagcttcacccgcaccttcagcctgcgcgacggcggctactacagctccgtggtggacagccacatgcacttcaagagcgccatccaccccagcatcctgcagaacgggggccccatgttcgccttccgccgcgtggaggaggatcacagcaacaccgagctgggcatcgtggagtaccagcacgccttcaagaccccggatgcagatgccggtgaagaataaagcggccgcgactctagatcataatcagccataccacatttgtagaggttttacttgctttaaaaaacctcccacacctccccctgaacctgaaacataaaatgaatgcaattgttgttgttaacttgtttattgcagcttataatggttacaaataaagcaatagcatcacaaatttcacaaataaagcatttttttcactgcattctagttgtggtttgtccaaactcatcaatgtatcttaaggcgtaaattgtaagcgttaatattttgttaaaattcgcgttaaatttttgttaaatcagctcattttttaaccaataggccgaaatcggcaaaatcccttataaatcaaaagaatagaccgagatagggttgagtgttgttccagtttggaacaagagtccactattaaagaacgtggactccaacgtcaaagggcgaaaaaccgtctatcagggcgatggcccactacgtgaaccatcaccctaatcaagttttttggggtcgaggtgccgtaaagcactaaatcggaaccctaaagggagcccccgatttagagcttgacggggaaagccggcgaacgtggcgagaaaggaagggaagaaagcgaaaggagcgggcgctagggcgctggcaagtgtagcggtcacgctgcgcgtaaccaccacacccgccgcgcttaatgcgccgctacagggcgcgtcaggtggcacttttcggggaaatgtgcgcggaacccctatttgtttatttttctaaatacattcaaatatgtatccgctcatgagacaataaccctgataaatgcttcaataatattgaaaaaggaagagtcctgaggcggaaagaaccagctgtggaatgtgtgtcagttagggtgtggaaagtccccaggctccccagcaggcagaagtatgcaaagcatgcatctcaattagtcagcaaccaggtgtggaaagtccccaggctccccagcaggcagaagtatgcaaagcatgcatctcaattagtcagcaaccatagtcccgcccctaactccgcccatcccgcccctaactccgcccagttccgcccattctccgccccatggctgactaattttttttatttatgcagaggccgaggccgcctcggcctctgagctattccagaagtagtgaggaggcttttttggaggcctaggcttttgcaaagatcgatcaagagacaggatgaggatcgtttcgcatgattgaacaagatggattgcacgcaggttctccggccgcttgggtggagaggctattcggctatgactgggcacaacagacaatcggctgctctgatgccgccgtgttccggctgtcagcgcaggggcgcccggttctttttgtcaagaccgacctgtccggtgccctgaatgaactgcaagacgaggcagcgcggctatcgtggctggccacgacgggcgttccttgcgcagctgtgctcgacgttgtcactgaagcgggaagggactggctgctattgggcgaagtgccggggcaggatctcctgtcatctcaccttgctcctgccgagaaagtatccatcatggctgatgcaatgcggcggctgcatacgcttgatccggctacctgcccattcgaccaccaagcgaaacatcgcatcgagcgagcacgtactcggatggaagccggtcttgtcgatcaggatgatctggacgaagagcatcaggggctcgcgccagccgaactgttcgccaggctcaaggcgagcatgcccgacggcgaggatctcgtcgtgacccatggcgatgcctgcttgccgaatatcatggtggaaaatggccgcttttctggattcatcgactgtggccggctgggtgtggcggaccgctatcaggacatagcgttggctacccgtgatattgctgaagagcttggcggcgaatgggctgaccgcttcctcgtgctttacggtatcgccgctcccgattcgcagcgcatcgccttctatcgccttcttgacgagttcttctgagcgggactctggggttcgaaatgaccgaccaagcgacgcccaacctgccatcacgagatttcgattccaccgccgccttctatgaaaggttgggcttcggaatcgttttccgggacgccggctggatgatcctccagcgcggggatctcatgctggagttcttcgcccaccctagggggaggctaactgaaacacggaaggagacaataccggaaggaacccgcgctatgacggcaataaaaagacagaataaaacgcacggtgttgggtcgtttgttcataaacgcggggttcggtcccagggctggcactctgtcgataccccaccgagaccccattggggccaatacgcccgcgtttcttccttttccccaccccaccccccaagttcgggtgaaggcccagggctcgcagccaacgtcggggcggcaggccctgccatagcctcaggttactcatatatactttagattgatttaaaacttcatttttaatttaaaaggatctaggtgaagatcctttttgataatctcatgaccaaaatcccttaacgtgagttttcgttccactgagcgtcagaccccgtagaaaagatcaaaggatcttcttgagatcctttttttctgcgcgtaatctgctgcttgcaaacaaaaaaaccaccgctaccagcggtggtttgtttgccggatcaagagctaccaactctttttccgaaggtaactggcttcagcagagcgcagataccaaatactgttcttctagtgtagccgtagttaggccaccacttcaagaactctgtagcaccgcctacatacctcgctctgctaatcctgttaccagtggctgctgccagtggcgataagtcgtgtcttaccgggttggactcaagacgatagttaccggataaggcgcagcggtcgggctgaacggggggttcgtgcacacagcccagcttggagcgaacgacctacaccgaactgagatacctacagcgtgagctatgagaaagcgccacgcttcccgaagggagaaaggcggacaggtatccggtaagcggcagggtcggaacaggagagcgcacgagggagcttccagggggaaacgcctggtatctttatagtcctgtcgggtttcgccacctctgacttgagcgtcgatttttgtgatgctcgtcaggggggcggagcctatggaaaaacgccagcaacgcggcctttttacggttcctggccttttgctggccttttgctcacatgttctttcctgcgttatcccctgattctgtggataaccgtattaccgccatgcat

SEQ ID NO: 470 - DNA, 4380 bp, Artificial Sequence
  pCR-2.1-topo TA vector
ccattcgccattcaggctgcgcaactgttgggaagggcgatcggtgcgggcctcttcgctattacgccagccaatacgcaaaccgcctctccccgcgcgttggccgattcattaatgcaggatcgatccagacatgataagatacattgatgagtttggacaaaccacaactagaatgcagtgaaaaaaatgctttatttgtgaaatttgtgatgctattgctttatttgtaaccattataagctgcaataaacaagttaacaacaacaattgcattcattttatgtttcaggttcagggggaggtgtgggaggttttttaaagcaagtaaaacctctacaaatgtggtatggctgattatgatcatgaacagactgtgaggactgaggggcctgaaatgagccttgggactgtgaatctaaaatacacaaacaattagaatcactagctcctgtgtataatattttcataaatcatactcagtaagcaaaactctcaagcagcaagcatatgcagctagtttaacacattatacacttaaaaattttatatttaccttagagctttaaatctctgtaggtagtttgtccaattatgtcacaccacagaagtaaggttccttcacaaagatcccaagctagcttataatacgactcactatagggagagagctatgacgtcgcatgcacgcgtaagcttgggcccctcgagggatcctctagagcggccgccgactagtgagctcgtcgacccgggaattccggaccggtacctgcaggcgtaccttctatagtgtcacctaaatagctttttgcaaaagcctaggctagagtccggaggctggatcggtcccggtgtcttctatggaggtcaaaacagcgtggatggcgtctccaggcgatctgacggttcactaaacgagctctgcttatatagacctcccaccgtacacgcctaccgcccatttgcgtcaatggggcggagttgttacgacattttggaaagtcccgttgattttggtgccaaaacaaactcccattgacgtcaatggggtggagacttggaaatccccgtgagtcaaaccgctatccacgcccattgatgtactgccaaaaccgcatcaccatggtaatagcgatgactaatacgtagatgtactgccaagtaggaaagtcccataaggtcatgtactgggcataatgccaggcgggccatttaccgtcattgacgtcaatagggggcgtacttggcatatgatacacttgatgtactgccaagtgggcagtttaccgtaaatactccacccattgacgtcaatggaaagtccctattggcgttactatgggaacatacgtcattattgacgtcaatgggcgggggtcgttgggcggtcagccaggcgggccatttaccgtaagttatgtaacgacctgcacgatgctgtttcctgtgtgaaattgttatccgctcacaattccacacattatacgagccggaagctataaagtgtaaagcctggggtgcctaatgagtgaaagggcctcgtatacgcctatttttataggttaatgtcatgataataatggtttcttagacgtcaggtggcacttttcggggaaatgtgcgcggaacccctatttgtttatttttctaaatacattcaaatatgtatccgctcatgagacaataaccctgataaatgcttcaataatattgaaaaacgcgcgaattgcaagctctgcattaatgaatcggccaacgcgcggggagaggcggtttgcgtattgggcgctcttccgcttcctcgctcactgactcgctgcgctcggtcgttcggctgcggcgagcggtatcagctcactcaaaggcggtaatacggttatccacagaatcaggggataacgcaggaaagaacatgtgagcaaaaggccagcaaaaggccaggaaccgtaaaaaggccgcgttgctggcgtttttccataggctccgcccccctgacgagcatcacaaaaatcgacgctcaagtcagaggtggcgaaacccgacaggactataaagataccaggcgtttccccctggaagctccctcgtgcgctctcctgttccgaccctgccgcttaccggatacctgtccgcctttctcccttcgggaagcgtggcgctttctcaatgctcacgctgtaggtatctcagttcggtgtaggtcgttcgctccaagctgggctgtgtgcacgaaccccccgttcagcccgaccgctgcgccttatccggtaactatcgtcttgagtccaacccggtaagacacgacttatcgccactggcagcagccactggtaacaggattagcagagcgaggtatgtaggcggtgctacagagttcttgaagtggtggcctaactacggctacactagaaggacagtatttggtatctgcgctctgctgaagccagttaccttcggaaaaagagttggtagctcttgatccggcaaacaaaccaccgctggtagcggtggtttttttgtttgcaagcagcagattacgcgcagaaaaaaaggatctcaagaagatcctttgatcttttctacggggtctgacgctcagtggaacgaaaactcacgttaagggattttggtcatgccataacttcgtatagcatacattatacgaagttatggcatgagattatcaaaaaggatcttcacctagatccttttaaattaaaaatgaagttttaaatcaatctaaagtatatatgagtaaacttggtctgacagttaccaatgcttaatcagtgaggcacctatctcagcgatctgtctatttcgttcatccatagttgcctgactccccgtcgtgtagataactacgatacgggagggcttaccatctggccccagtgctgcaatgataccgcgagacccacgctcaccggctccagatttatcagcaataaaccagccagccggaagggccgagcgcagaagtggtcctgcaactttatccgcctccatccagtctattaattgttgccgggaagctagagtaagtagttcgccagttaatagtttgcgcaacgttgttgccattgctacaggcatcgtggtgtcacgctcgtcgtttggtatggcttcattcagctccggttcccaacgatcaaggcgagttacatgatcccccatgttgtgcaaaaaagcggttagctccttcggtcctccgatcgttgtcagaagtaagttggccgcagtgttatcactcatggttatggcagcactgcataattctcttactgtcatgccatccgtaagatgcttttctgtgactggtgagtactcaaccaagtcattctgagaatagtgtatgcggcgaccgagttgctcttgcccggcgtcaatacgggataataccgcgccacatagcagaactttaaaagtgctcatcattggaaaacgttcttcggggcgaaaactctcaaggatcttaccgctgttgagatccagttcgatgtaacccactcgtgcacccaactgatcttcagcatcttttactttcaccagcgtttctgggtgagcaaaaacaggaaggcaaaatgccgcaaaaaagggaataagggcgacacggaaatgttgaatactcatactcttcctttttcaatattattgaagcatttatcagggttattgtctcatgccaggggtgggcacacatatttgataccagcgatccctacacagcacataattcaatgcgacttccctctatcgcacatcttagacctttattctccctccagcacacatcgaagctgccgagcaagccgttctcaccagtccaagacctggcatgagcggatacatatttgaatgtatttagaaaaataaacaaataggggttccgcgcacatttccccgaaaagtgccacctgaaattgtaaacgttaatattttgttaaaattcgcgttaaatttttgttaaatcagctcattttttaaccaataggccgaaatcggcaaaatcccttataaatcaaaagaatagaccgagatagggttgagtgttgttccagtttggaacaagagtccactattaaagaacgtggactccaacgtcaaagggcgaaaaaccgtctatcagggcgatggcccactacgtgaaccatcaccctaatcaagttttttggggtcgaggtgccgtaaagcactaaatcggaaccctaaagggagcccccgatttagagcttgacggggaaagccggcgaacgtggcgagaaaggaagggaagaaagcgaaaggagcgggcgctagggcgctggcaagtgtagcggtcacgctgcgcgtaaccaccacacccgccgcgcttaatgcgccgctacagggcgcgtc

SEQ ID NO: 471 - DNA, 19 bp, Artificial Sequence
  IRES-Taqman forward qPCR primer
tctcgccaaaggaatgcaa

SEQ ID NO: 472 - DNA, 20 bp, Artificial Sequence
  IRES-Taqman reverse qPCR primer
cctgcaaagggtcgctacag

SEQ ID NO: 473 - DNA, 20 bp, Artificial Sequence
  IRES-MGB probe (contains 5' FAM fluorophore and 3' MGB silencer for Taqman qPCR)
tctgttgaatgtcgtgaagg

SEQ ID NO: 474 - DNA, 20 bp, Artificial Sequence
  IRES qPCR forward primer
atagttgtggaaagagtcaa

SEQ ID NO: 475 - DNA, 20 bp, Artificial Sequence
  IRES qPCR reverse primer
ttaacctcgactaaacacat

SEQ ID NO: 476 - DNA, 28 bp, Artificial Sequence
  zGFP qPCR forward primer
caagattagacacaacatagaggatgga

SEQ ID NO: 477 - DNA, 28 bp, Artificial Sequence
  zGFP qPCR reverse primer
tgtgatctctcttttcattaggatcttt

SEQ ID NO: 478 - DNA, 13 bp, Artificial Sequence
  zGFP-MGB probe (contains 5' FAM fluorophore and 3' MGB silencer for Taqman qPCR)
ctgtgcagctggc

SEQ ID NO: 479 - DNA, 20 bp, Artificial Sequence
  pUC ori qPCR forward primer
gcgtaatctgctgcttgcaa

SEQ ID NO: 480 - DNA, 22 bp, Artificial Sequence
  pUC ori qPCR reverse primer
aagccagttaccttcggaaaaa

SEQ ID NO: 481 - DNA, 16 bp, Artificial Sequence
  pUC ori-MGB probe (contains 5' FAM fluorophore and 3' MGB silencer for Taqman qPCR)
tttgccggatcaagag

SEQ ID NO: 482 - DNA, 4562 bp, Artificial Sequence
  pCpG-SEAP vector
ttaattaaaattatctctaaggcatgtgaactggctgtcttggttttcatctgtacttcatctgctacctctgtgacctgaaacatatttataattccattaagctgtgcatatgatagatttatcatatgtattttccttaaaggatttttgtaagaactaattgaattgatacctgtaaagtctttatcacactacccaataaataataaatctctttgttcagctctctgtttctataaatatgtaccagttttattgtttttagtggtagtgattttattctctttctatatatatacacacacatgtgtgcattcataaatatatacaatttttatgaataaaaaattattagcaatcaatattgaaaaccactgatttttgtttatgtgagcaaacagcagattaaaaggaattcctgcaggagtcaatgggaaaaacccattggagccaagtacactgactcaatagggactttccattgggttttgcccagtacataaggtcaatagggggtgagtcaacaggaaagtcccattggagccaagtacattgagtcaatagggactttccaatgggttttgcccagtacataaggtcaatgggaggtaagccaatgggtttttcccattactgacatgtatactgagtcattagggactttccaatgggttttgcccagtacataaggtcaataggggtgaatcaacaggaaagtcccattggagccaagtacactgagtcaatagggactttccattgggttttgcccagtacaaaaggtcaatagggggtgagtcaatgggtttttcccattattggcacatacataaggtcaataggggtgactagtggagaagagcatgcttgagggctgagtgcccctcagtgggcagagagcacatggcccacagtccctgagaagttggggggaggggtgggcaattgaactggtgcctagagaaggtggggcttgggtaaactgggaaagtgatgtggtgtactggctccacctttttccccagggtgggggagaaccatatataagtgcagtagtctctgtgaacattcaagcttctgccttctccctcctgtgagtttggtaagtcactgactgtctatgcctgggaaagggtgggcaggagatggggcagtgcaggaaaagtggcactatgaaccctgcagccctaggaatgcatctagacaattgtactaaccttcttctctttcctctcctgacaggttggtgtacagtagcttccaccatgtggggtgcctgtctgctattgctgggcttaagtcttcaagtttgccccagtgtcattcctgtggaggaggagaatcctgctttttggaataggaaggcagctgaagccttggatgcagccaagaagctcaagcccattcagacatctgcaaagaatcttgtcatcctcatgggtgatggaatgggtgtctccactgtaacagccaccaggattctgaagggccagcaacaaggtcatctaggcccagagacccagttggcaatggacaggttccctcacatggccctttccaagacttacaacactgacaagcagattcctgactctgctgggacaggcacagcattcttgtgtggagtaaaaaccaacatgaaagtcattggtctttcagctgctgccagattcaaccagtgcaacaccacatggggcaatgaagtggtctctgtaatgcacagggccaaaaaagctgggaaaagtgtgggtgtggtgacaaccacctctgtccagcatgcctctcctgctggaacttatgcccacacagtgaacagaggttggtactctgatgctcagatgcctgcctcagctttacaagatggctgcaaggacatcagcacccagctcatctcaaacatggacatagatgtcatcttagggggtgggagaaagttcatgttcccaaaggggactcctgaccaggagtaccccacagacacaaagcaggctggcacaagattagatggtaggaaccttgtgcaagagtggcttgccaagcatcagggagcaaggtatgtctggaacaggagtgagctaatccaggcctctttgaacaggtctgtcactcacctaatggggttatttgagcccaatgacatgaagtatgagatacacagggaccctgcccaggacccctccttagcagaaatgactgaagttgctgtgaggatgttgtccagaaatccaaaagggttctacctctttgttgaggggggaaggattgatcatggtcaccatgagacagttgcttacagagccttaactgaggctgtgatgtttgattctgctgtggacaaggctgacaaactgacctctgagcaggacacaatgattctagtgactgctgaccacagtcatgttttctcctttgggggctacacccagaggggtgcttcaatctttggcctggcccctttcaaggcagaagatgggaagagtttcacctccatcctctatgggaatggtcctgggtacaagctgcacaatggggccagagctgatgtgacagaagaggagagctccaacccaacctaccagcagcaagcagcagtccctctttcttcagaaacccactctggggaagatgtggccatatttgccagaggcccccaagcccacttggtgcatggagttcaggagcagaattacatagctcatgtaatggcttttgctgcttgcttggagccctacacagactgtggcctagccagcccagcaggccagtcctctgcagtaagcccaggctagagctagctggccagacatgataagatacattgatgagtttggacaaaccacaactagaatgcagtgaaaaaaatgctttatttgtgaaatttgtgatgctattgctttatttgtaaccattataagctgcaataaacaagttaacaacaacaattgcattcattttatgtttcaggttcagggggaggtgtgggaggttttttaaagcaagtaaaacctctacaaatgtggtatggaattcagtcaatatgttcaccccaaaaaagctgtttgttaacttgtcaacctcattctaaaatgtatatagaagcccaaaagacaataacaaaaatattcttgtagaacaaaatgggaaagaatgttccactaaatatcaagatttagagcaaagcatgagatgtgtggggatagacagtgaggctgataaaatagagtagagctcagaaacagacccattgatatatgtaagtgacctatgaaaaaaatatggcattttacaatgggaaaatgatgatctttttcttttttagaaaaacagggaaatatatttatatgtaaaaaataaaagggaacccatatgtcataccatacacacaaaaaaattccagtgaattataagtctaaatggagaaggcaaaactttaaatcttttagaaaataatatagaagcatgccatcaagacttcagtgtagagaaaaatttcttatgactcaaagtcctaaccacaaagaaaagattgttaattagattgcatgaatattaagacttatttttaaaattaaaaaaccattaagaaaagtcaggccatagaatgacagaaaatatttgcaacaccccagtaaagagaattgtaatatgcagattataaaaagaagtcttacaaatcagtaaaaaataaaactagacaaaaatttgaacagatgaaagagaaactctaaataatcattacacatgagaaactcaatctcagaaatcagagaactatcattgcatatacactaaattagagaaatattaaaaggctaagtaacatctgtggcttaattaaaacagtagttgacaattaaacattggcatagtatatctgcatagtataatacaactcactataggagggccatcatggccaagttgaccagtgctgtcccagtgctcacagccagggatgtggctggagctgttgagttctggactgacaggttggggttctccagagattttgtggaggatgactttgcaggtgtggtcagagatgatgtcaccctgttcatctcagcagtccaggaccaggtggtgcctgacaacaccctggcttgggtgtgggtgagaggactggatgagctgtatgctgagtggagtgaggtggtctccaccaacttcagggatgccagtggccctgccatgacagagattggagagcagccctgggggagagagtttgccctgagagacccagcaggcaactgtgtgcactttgtggcagaggagcaggactgaggataacctaggaaaccttaaaacctttaaaagccttatatattcttttttttcttataaaacttaaaaccttagaggctatttaagttgctgatttatattaattttattgttcaaacatgagagcttagtacatgaaacatgagagcttagtacattagccatgagagcttagtacattagccatgagggtttagttcattaaacatgagagcttagtacattaaacatgagagcttagtacatactatcaacaggttgaactgctgatc

SEQ ID NO: 483 - DNA, 1849 bp, Homo sapiens
  E2F gene, 5' region
gggcccaaaattagcaagtgaccacgtggttctgaagccagtggcctaaggaccacccttgcagaaccgtggtctccttgtcacagtctaggcagcctctggcttagcctctgtttctttcataacctttctcagcgcctgctctgggccagaccagtgttgggaggagtcgctactgagctcctagattggcaggggaggcagatggagaaaaggagtgtgtgtggtcagcattggagcagaggcagcagtgggcaatagaggaagtgagtaaatccttgggagggctccctagaagtgatgtgttttctttttttgttttagagacaggatctcgctctgtcgcccaggctggtgtgcagtggcatgatcatagctcactgcagcctcgacttctcgggctcaagcaatcctcccacctcagcctcccaagtagctgggactacgggcacacgccaccatgcctggctaatttttgtattttttgtagagatgggtcttcaccatgttgatcaggctggtctcgaactcctgggctcatgcgatccaccccgccagctgattacagggattccggtggtgagccaccgcgcccagacgccacttcatcgtattgtaaacgtctgttacctttctgttcccctgtctactggactgtgagctccttagggccacgaattgaggatggggcacagagcaagctctccaaacgtttgttgaatgagtgagggaatgaatgagttcaagcagatgctatacgttggctgttggagattttggctaaaatgggacttgcaggaaagcccgacgtccccctcgccatttccaggcaccgctcttcagcttgggctctgggtgagcgggatagggctgggtgcaggattaggataatgtcatgggtgaggcaagttgaggatggaagaggtggctgatggctgggctgtggaactgatgatcctgaaaagaagaggggacagtctctggaaatctaagctgaggctgttgggggctacaggttgagggtcacgtgcagaagagaggctctgttctgaacctgcactatagaaaggtcagtgggatgcgggagcgtcggggcggggcggggcctatgttcccgtgtccccacgcctccagcaggggacgcccgggctgggggcggggagtcagaccgcgcctggtaccatccggacaaagcctgcgcgcgccccgccccgccattggccgtaccgccccgcgccgccgccccatcccgcccctcgccgccgggtccggcgcgttaaagccaataggaaccgccgccgttgttcccgtcacggccggggcagccaattgtggcggcgctcggcggctcgtggctctttcgcggcaaaaaggatttggcgcgtaaaagtggccgggactttgcaggcagcggcggccgggggcggagcgggatcgagccctcgccgaggcctgccgccatgggcccgcgccgccgccgccgcctgtcacccgggccgcgcgggccgtgagcgtcatggccttggccggggcccctgcgggcggcccatgcgcgccggcgctggaggccctgctcggggccggcgcgctgcggctgctcgactcctcgcagatcgtcatcatctccgccgcgcaggacgccagcgccccgccggctcccaccggccccgcggcgcccgccgccggcccctgcgaccctgacctgctgctcttcgccacaccgcaggcgccccggcccacacccagtgcgccgcggcccgcgctcggccgcccgccggtacggaccccagggacgccgcgccgacagcgccgcctgtgccccccgcgcagacccgggagggcgccgtgt

SEQ ID NO: 484 - DNA, 23 bp, Artificial Sequence
  zLacZ forward qPCR primer
agagaggaggctatgctgacaga

SEQ ID NO: 485 - DNA, 22 bp, Artificial Sequence
  zLacZ reverse qPCR primer
gaatccaacatcacaggcttca

SEQ ID NO: 486 - DNA, 15 bp, Artificial Sequence
  zLacZ-MGB probe (contains 5' FAM fluorophore and 3' MGB silencer for Taqman qPCR)
ctgctgagatcccca

SEQ ID NO: 487 - DNA, 20 bp, Artificial Sequence
  EGFP forward qPCR primer
aagctggagtacaactacaa

SEQ ID NO: 488 - DNA, 20 bp, Artificial Sequence
  EGFP reverse qPCR primer
atcttgaagttcaccttgat

SEQ ID NO: 489 - DNA, 887 bp, Baboon orthoreovirus
  Baboon Reovirus segment S4, complete sequence
  ref <308>: DATABASE ACCESSION NUMBER: GenBank: AF406787.1
  ref <309>: DATABASE ENTRY DATE: 2001-09-10
gtaaatttttctcgcgataagtacatgggtcaaagacattcaatagttcaaccaccagctccaccgccaaatgcttttgttgaaattgtgagcagttctactggcattataatcgctgttggcatatttgcatttatattctcatttttatataagttgctgcagtggtacaatcgtaagtcaaagaataagaaacgtaaagagcaaattagagaacaaattgagcttggtttattatcatatggtgctggagtagcatcacttcctttgctcaacgttattgcacataatcctggatcagttatctcggctacccctatctataaaggtccgtgcactggtgtacctaattcgcgcctacttcaaatcacgagcgggactgcagaagagaacactagaattttgaatcatgatggaagaaacccagatggaagtatcaacgtttgagtggccaaagtcattagatgaaagtttgcaagtgttatgtaatgagttgaagggaaagactgaatggcaagatgacatggaagattggatgccatactggatatatatgaaacatgatggtattgctatctcgcaatccagatactcactactccagcaactagctgtatgggtgtggaagtgcttcgactttgatatgtgtgtgtacaatatctggacgacatggttagtaaaacatgcatgttctcgatgtcctgagttcgatgatgaggccttctggtctggggtgccaacaattattaaattagtaattaggaagacaatgcataggtacgcttatcttgatgatagtactcttgcggatttgactgagcaggttgggctctgagttcattgaccatgtagagactgcatgcacgcagcgcggaaagtcattcatc

SEQ ID NO: 490 - DNA, 15246 bp, Parainfluenza virus 5
  Simian Virus 5 (parainfluenza virus 5), complete genome
  ref <308>: DATABASE ACCESSION NUMBER: NCBI Reference Seque
  ref <309>: DATABASE ENTRY DATE: 2010-03-11
accaaggggaaaatgaagtggtgactcaaatcatcgaagaccctcgagattacataggtccggaacctatggccttcgtgaccgacctcgagtcagagtagttcaataaggacctatcaagtttgggcaatttttcgtccccgacacaaaaatgtcatccgtgcttaaagcatatgagcgattcacgctcactcaagaactgcaagatcagagtgaggaaggtacaatcccacctacaacactaaaaccggtaatcagggtatttatactaacctctaataacccagagctaagatcccggcttcttctattctgcctacggattgttctcagtaatggtgcaagggattcccatcgctttggagcattactcacaatgttttcgctaccatcagccacaatgctcaatcatgtcaaattagctgaccagtcaccagaagctgatatcgaaagggtagagatcgatggctttgaggagggatcattccgcttaatccccaatgcacgttcaggtatgagccgtggagagatcaatgcctatgctgcacttgcagaagatctacctgacacactaaaccatgcaacacctttcgttgattccgaagtcgagggaactgcatgggatgagattgagactttcttagatatgtgttacagtgtcctaatgcaggcatggatagtgacttgcaagtgcatgactgcgccagaccaacctgctgcttctattgagaaacgcctgcaaaaatatcgtcagcaaggcaggatcaacccgagatatctcctgcaaccggaggctcgacgaataatccagaatgtaatccggaagggaatggtggtcagacatttcctcacctttgaactgcagcttgcccgagcacaaagccttgtatcaaataggtattatgctatggtaggggatgttggaaagtatatagagaattgtggaatgggaggcttctttttgacactaaaatatgcattaggaactagatggcccacacttgctttagctgcattttcaggagagctaacaaagctaaagtccctcatggcattataccagacccttggtgagcaggcccgatatttggccctattggagtcaccacatttgatggattttgctgcagcaaactacccactgctatatagctatgctatgggaataggctatgtgttagatgtcaacatgaggaactacgctttctccagatcatacatgaacaagacatatttccaattgggaatggaaactgcaagaaaacaacagggtgcagttgacatgaggatggcagaagatctcggtctaactcaagccgaacgcaccgagatggcaaatacacttgccaaattgaccacagcaaatcgaggggcagacaccaggggaggagtcaacccgttctcatctgtcactgggacaactcaggtgcccgctgcagcaacaggtgacacactcgagagttacatggcagcggatcgactgaggcagagatatgctgatgcaggcacccatgatgatgagatgccaccattggaagaggaggaagaggacgacacatctgcaggtccacgcactggaccaactcttgaacaagtggccttggacatccagaacgcagcagttggagctcccatccatacagatgacctgaatgccgcactgggtgatcttgacatctagacaattcagatcccaatctaaaattgacatacctaattgattagttagatggaactacagtggattccataaggttcctgcctaccatcggctttaaagaaaaaaataggcccggacgggttagcaacaagcgactgccggtgccaacagcgcaatccacaatctacaatggatcccactgatctgagcttctccccagatgagatcaataagctcatagagacaggcctgaatactgtagagtattttacttcccaacaagtcacaggaacatcctctcttggaaagaatacaataccaccaggggtcacaggactactaaccaatgctgcagaggcaaagatccaagagtcaactaaccatcagaagggctcagttggtgggggtgcaaaaccaaagaaaccgcgaccaaaaattgccattgtgccagcagatgacaaaacagtgcccggaaagccgatcccaaaccctctattaggtctggactccaccccgagcacccaaactgtgcttgatctaagtgggaaaacattaccatcaggatcctataagggggttaagcttgcgaaatttggaaaagaaaatctgatgacacggttcatcgaggaacccagagagaatcctatcgcaaccagttcccccatcgattttaagaggggcagggataccggcgggttccatagaagggagtactcaatcggatgggtgggagatgaagtcaaggtcactgagtggtgcaatccatcctgttctccaatcaccgctgcagcaaggcgatttgaatgcacttgtcaccagtgtccagtcacttgctctgaatgtgaacgagatacttaatacagtgagaaatttggactctcggatgaatcaactggagacaaaagtagatcgcattctctcatctcagtctctaatccagaccatcaagaatgacatagttggacttaaagcagggatggctactttagaaggaatgattacaactgtgaaaatcatggacccgggagttcccagtaatgttactgtggaagatgtacgcaagacactaagtaaccatgctgttgttgtgccagaatcattcaatgatagtttcttgactcaatctgaagatgtaatttcacttgatgagttggctcgaccaactgcaacaagtgttaagaagattgtcaggaaggttcctcctcagaaggatctgactggattgaagattacactagagcaattggcaaaggattgcatcagcaaaccgaagatgagggaagagtatctcctcaaaatcaaccaggcttccagtgaggctcagctaattgacctcaagaaagcaatcatccgcagtgcaatttgatcaagaaacacccaattacactacactggtatgacactgtactaaccctgagggttttagaaaaaacgattaacgataaataagcccgaacactacacactacctgaggcagccatgccatccatcagcattcccgcagaccccaccaatccacgtcaatcaataaaagcgttcccaattgtgatcaacagtgatgggggtgagaaaggccgcttggttaaacaactacgcacaacctacttgaatgacctagatactcatgagccactggtgacattcataaatacctatggattcatctacgaacaggatcgggggaataccattgtcggagaggatcaacttgggaagaaaagagaggctgtgaccgctgcaatggttacccttggatgtgggcctaatctaccatcattagggaatgtcctgggacaactgagggaattccaggtcactgttaggaagacatccagcaaagcggaagagatggtctttgaaattgttaagtatccgagaatatttcggggtcatacattaatccagaaaggactagtctgtgtctccgcagaaaaatttgttaagtcaccagggaaaatacaatctggaatggactatctcttcattccgacatttctgtcagtgacttactgtccagctgcaatcaaatttcaggtacctggccccatgttgaaaatgagatcaagatacactcagagcttacaacttgaactaatgataagaatcctgtgtaagcccgattcgccacttatgaaggtccatacccctgacaaggagggaagaggatgtcttgtatcagtatggctgcatgtatgcaacatcttcaaatcaggaaacaagaatggcagtgagtggcaggaatactggatgagaaagtgtgctaacatgcaacttgaagtgtcgattgcagatatgtggggaccaactatcataattcatgccagaggtcacattcccaaaagtgctaagttgttttttggaaagggtggatggagctgccatccacttcacgaagttgttccaagtgtcactaaaacactatggtccgtgggctgtgagattacaaaggcgaaggcaataatacaagagagtagcatctctcttctcgtggagactactgacatcataagtccaaaagtcaaaatttcatctaagcatcgccgctttgtgaaatcaaattggggtctgttcaagaaaactaaatcactgcctaacctgacggagctggaatgactgacctctaatcgagactacaccgccgcaaactataggtgggtggtacctcagtgattaatcttgtaagcactgatcgtaggctacaacacactaatattatccagattagagagcttaattagctctgtattaataataacactactattccaataactggaatcaccagcttgatttatctccaaaatgattcaaagaaaacaaatcatattaagactatcctaagcacgaacccatatcgtccttcaaatcatgggtactataattcaatttctggtggtctcctgtctattggcaggagcaggcagccttgatccagcagccctcatgcaaatcggtgtcattccaacaaatgtccggcaacttatgtattatactgaggcctcatcagcattcattgttgtgaagttaatgcctacaattgactcgccgattagtggatgtaatataacatcaatttcaagctataatgcaacagtgacaaaactcctacagccgatcggtgagaatttggagacgattaggaaccagttgattccaactcggaggagacgccggtttgcaggggtggtgattggattagctgcattaggagtagctactgccgcacaggtcactgccgcagtggcactagtaaaggcaaatgaaaatgctgcggctatactcaatctcaaaaatgcaatccaaaaaacaaatgcagcagttgcagatgtggtccaggccacacaatcactaggaacggcagttcaagcagttcaagatcacataaacagtgtggtaagtccagcaattacagcagccaattgtaaggcccaagatgctatcattggctcaatcctcaatctctatttgaccgagttgacaaccatcttccacaatcaaattacaaaccctgcattgagtcccattacaattcaagctttaaggatcctactggggagtaccttgccgactgtggtcgaaaaatctttcaatacccagataagtgcagctgagcttctctcatcagggttattgacaggccagattgtgggattagatttgacctatatgcagatggtcataaaaattgagctgccaactttaactgtacaacctgcaacccagatcatagatctggccaccatttctgcattcattaacaatcaagaagtcatggcccaattaccaacacgtgttatggtgactggcagcttgatccaagcctatcccgcatcgcaatgcaccattacacccaacactgtgtactgtaggtataatgatgcccaagtactctcagatgatactatggcttgcctccaaggtaacttgacaagatgcaccttctctccagtggttgggagctttctcactcgattcgtgctgttcgatggaatagtttatgcaaattgcaggtcgatgttgtgcaagtgcatgcaacctgctgctgtgatcctacagccgagttcatcccctgtaactgtcattgacatgtacaaatgtgtgagtctgcagcttgacaatctcagattcaccatcactcaattggccaatgtaacctacaatagcaccatcaagcttgaatcatcccagatcttgtctattgatccgttggatatatcccaaaatctagctgcggtgaataagagtctaagtgatgcactacaacacttagcacaaagtgacacatatctttctgcaatcacatcagctacgactacaagtgtattatccataatagcaatctgtcttggatcgttaggtttaatattaataatcttgctcagtgtagttgtgtggaagttattgaccattgtcgttgctaatcgaaatagaatggagaattttgtttatcataaataagcattccaccactcacgatctgatctcagtgagaaaaatcaacctgcaactcttggaacaagataagacagtcatccattagtaatttttaagaaaaaaacgataggaccgaacctagtattgaaagaaccgtctcggtcaatctaggtaatcgagctgataccgtctcggaaagctcaaatcatgctgcctgatccggaagatccggaaagcaagaaagctacaaggagagcaggaaacctaattatctgcttcctattcatcttctttctgtttgtaaccttcattgttccaactctaagacacttgctgtcctaacacctgctataggctatccactgcatcatctctcctgccatacttcctactcacatcatatctattttaaagaaaaaataggcccgaacactaatcgtgccggcagtgccactgcacacacaacactacacatacaatacactacaatggttgcagaagatgcccctgttagggccacttgccgagtattatttcgaacaacaactttaatctttctatgcacactactagcattaagcatctctatcctttatgagagtttaataacccaaaagcaaatcatgagccaagcaggctcaactggatctaattctggattaggaagtatcactgatcttcttaataatattctctctgtcgcaaatcagattatatataactctgcagtcgctctacctctacaattggacactcttgaatcaacactccttacagccattaagtctcttcaaaccagtgacaagctagaacagaactgctcgtggagtgctgcactgattaatgataatagatacattaatggcatcaatcagttctatttttcaattgctgagggtcgcaatctgacacttggcccacttcttaatatgcctagtttcattccaactgccacgacaccagagggctgcaccaggatcccatcattctcgctcactaagacacactggtgttatacacacaatgttatcctgaatggatgccaggatcatgtatcctcaaatcaatttgtttccatgggaatcattgaacccacttctgccgggtttccattctttcgaaccctaaagactctatatctcagcgatggggtcaatcgtaagagctgctctatcagtacagttccggggggttgtatgatgtactgttttgtttctactcaaccagagagggatgactacttttctgccgctcctccagaacaacgaattattataatgtactataatgatacaatcgtggagcgcataattaatccacccggggtactagatgtatgggcaacattgaacccaggaacaggaagcggggtatattatttaggttgggtgctctttccaatatatggcggcgtgattaaaggtacgagtttatggaataatcaagcaaataaatactttatcccccagatggttgctgctctctgctcacaaaaccaggcaactcaagtccaaaatgctaagtcatcatactatagcagctggtttggcaatcgaatgattcagtctgggatcctggcatgtcctcttcgacaggatctaaccaatgagtgtttagttctgcccttttctaatgatcaggtgcttatgggtgctgaagggagattatacatgtatggtgactcggtgtattactatcaaagaagcaatagttggtggcctatgaccatgctgtataaggtaaccataacattcactaatggtcagccatctgctatatcagctcagaatgtgcccacacagcaggtccctagacctgggacaggagactgctctgcaaccaatagatgtcccggtttttgcttgacaggagtgtatgccgatgcctggttactgaccaacccttcgtctaccagtacatttggatcagaagcaaccttcactggttcttatctcaacacagcaactcagcgtatcaatccgacgatgtatatcgcgaacaacacacagatcataagctcacagcaatttggatcaagcggtcaagaagcagcatatggccacacaacctgttttagggacacaggctctgttatggtatactgtatctatattattgaattgtcctcatctctcttaggacaatttcagattgtcccatttatccgtcaggtgacactatcctaaaggcagaagccttcaggtctgacccagccaatcaaagcattataccagaccatggaatgcataccaaacattattgacactaatgacacacaaaattggttttaagaaaaaccaagagaacaataggccagaatggctgggtctcgggagatattactccctgaagtccatctcaattcaccaattgtaaagcataagctatactattacattctacttggaaacctcccaaatgagatcgaccttgacgatttaggtccattacataatcaaaattggaatcagatagcacatgaagagtctaacttagctcaacgcttggtaaatgtaagaaattttctaattacccacatccctgatcttagaaagggccattggcaagagtatgtcaatgtaatactgtggccgcgaattcttcccttgatcccggattttaaaatcaatgaccaattgcctctgctcaaaaattgggacaagttagttaaagaatcatgttcagtaatcaatgcaggtacttcccagtgcattcagaatctcagctatggactgacaggtcgtgggaacctctttacacgatcacgtgaactctctggtgaccgcagggatattgatcttaagacagttgtggcagcatggcatgactcagactggaaaagaataagtgatttttggattatgatcaaattccagatgagacaattaattgttaggcaaacagatcataatgattctgatttaatcacgtatatcgaaaatagagaaggcataatcatcataacccctgaactggtagcattatttaacactgagaatcatacactaacatacatgacctttgaaattgtactgatggtttcagatatgtacgaaggtcgtcacaacattttatcactatgcacagttagcacttacctgaatcctctgaagaaaagaataacatatttattgagccttgtagataacttagcttttcagataggtgatgctgtatataacataattgctttgctagaatcctttgtatatgcacagttgcaaatgtcagatcccatcccagaactcagaggacaattccatgcattcgtatgttctgagattcttgatgcactaagaggaactaatagtttcacccaggatgaattaagaactgtgacaactaatttgatatccccattccaagatctgaccccagatcttacggctgaattgctctgtataatgaggctttggggacaccccatgctcactgccagtcaagctgcaggaaaggtacgcgagtctatgtgtgctggaaaagtattagactttcccaccattatgaaaacactagcctttttccatactattctgatcaatggatacaggaggaagcatcatggagtatggccacccttaaacttaccgggtaatgcttcaaagggtctcacggaacttatgaatgacaatactgaaataagctatgaattcacacttaagcattggaaggaagtctctcttataaaattcaagaaatgttttgatgcagacgcaggtgaggaactcagtatatttatgaaagataaggcaattagtgccccaaaacaagactggatgagtgtgtttagaagaagcctaatcaaacagcgccatcagcatcatcaggtccccctaccaaatccattcaatcgacggctgttgctaaactttctcggagatgacaaattcgacccgaatgtggagctacagtatgtaacatcaggtgagtatctacatgatgacacgttttgtgcatcatattcactaaaagagaaggaaattaaacctgatggtcgaatttttgcaaagttgactaagagaatgagatcatgtcaagttatagcagaatctcttttagcgaaccatgctgggaagttaatgaaagagaatggtgttgtgatgaatcagctatcattaacaaaatcactattaacaatgagtcagattggaataatatccgagaaagctagaaagtcaactcgagataacataaatcaacctggtttccagaatatccagagaaataaatcacatcactccaagcaagtcaatcagcgagatccaagtgatgactttgaattggcagcatcttttttaactactgatctcaaaaaatattgtttacaatggaggtaccagacaattatcccatttgctcaatcattaaacagaatgtatggttatcctcatctctttgagtggattcacttacggctaatgcgtagtacactttacgtgggggatcccttcaacccaccagcagataccagtcaatttgatctagataaagtaattaatggagatatcttcattgtatcacccagaggtggaattgaagggctgtgtcaaaaggcttggacaatgatatctatcgctgtgataattctatctgccacagagtctggcacacgagtaatgagtatggtgcagggagataatcaagcaattgctgtcaccacacgagtaccaaggagcctgccgactcttgagaaaaagactattgcttttagatcttgtaatctattctttgagaggttaaaatgtaataattttggattaggtcaccatttgaaagaacaagagactatcattagttctcacttctttgtttatagcaagagaatattctatcaggggaggattctaacgcaagccttaaaaaatgctagtaagctctgcttgacagctgatgtcctaggagaatgcacccaatcatcatgttctaatcttgcaactactgtcatgaggttaactgagaatggtgttgaaaaagatatctgtttctacttgaatatctatatgaccatcaaacagctctcctatgatatcatcttccctcaagtgtcaattcctggagatcagatcacattagaatacataaataatccacacctggtatcacgattggctcttttgccatcccagttaggaggtctaaactacctgtcatgcagtaggctgttcaatcgaaacataggcgacccggtggtttccgcagttgcagatcttaagagattaattaaatcaggatgtatggattactggatcctttataacttattagggagaaaaccgggaaacggctcatgggctactttagcagctgacccgtactcaatcaatatagagtatcaataccctccaactacagctcttaagaggcacacccaacaagctctgatggaactcagtacgaatccaatgttacgtggcatattctctgacaatgcacaggcagaagaaaataaccttgctaggtttctcctggatagggaggtgatctttccgcgtgtagctcacatcatcattgagcaaaccagtgtcgggaggagaaaacagattcaaggatatttggattcaactagatcgataatgaggaaatcactagaaattaagcccttatccaataggaagcttaatgaaatactggattacaacatcaattacctagcttacaatttggcattactcaagaatgctattgaacctccgacttatttgaaggcaatgacacttgaaacatgtagcatcgacattgcaaggaacctccggaagctctcctgggccccactcttgggtgggagaaatcttgaaggattagagacgccagatcccattgaaattactgcaggagcattaattgttggatcgggctactgtgaacagtgtgctgcaggagacaatcgattcacatggtttttcttgccatctggtatcgagataggaggggatccccgtgataatcctcctatccgtgtaccgtacattggctccaggactgatgagaggagggtagcctcaatggcatacatcaggggtgcctcgagtagcttaaaagcagttcttagactggcgggagtgtacatctgggcattcggagatactctggagaattggatagatgcactggatttgtctcacactagagttaacatcacacttgaacagctgcaatccctcaccccacttccaacctctgccaatctaacccatcggttggatgatggcacaactaccctaaagtttactcctgcgagctcttacaccttttcaagtttcactcatatatcaaatgatgagcaatacctgacaattaatgacaaaactgcagattcaaatataatctaccaacagttaatgatcactggactcggaatcttagaaacatggaataatcccccaatcaatagaacattcgaagaatctaccctacatttgcacactggtgcatcatgttgtgtccgacctgtggactcctgcattctctcagaagcattaacagtcaagccacatattacagtaccgtacagcaataaatttgtatttgatgaggacccgctatctgaatatgaaactgcaaaactggaatcgttatcattccaagcccaattaggcaacattgatgctgtagatatgacaggtaaattaacattattgtcccaattcactgcaaggcagattatcaatgcaatcactggactcgatgagtctgtctctcttactaatgatgccattgttgcatcagactatgtctccaattggattagtgaatgcatgtataccaaattagatgaattatttatgtattgtgggtgggaactactattggaactatcctatcaaatgtattatctgagggtagttgggtggagtaatatagtggattattcttacatgatcttgagaagaatcccgggtgcagcattaaacaatctggcatctacattaagtcatccaaaacttttccgacgagctatcaacctagatatagttgcccccttaaatgctcctcattttgcatctctggactacatcaagatgagtgtggatgcaatactctggggctgtaaaagagtcatcaatgtgctctccaatggaggggacttagaattagttgtgacatctgaagatagccttattctcagtgaccgatccatgaatctcattgcaaggaaattaactttattatcactgattcaccataatggtttggaactaccaaagattaaggggttctctcctgatgagaagtgtttcgctttgacagaatttttgaggaaagtggtgaactcagggttgagttcaatagagaacctatcaaattttatgtacaatgtggagaacccacggcttgcagcattcgccagcaacaattactacctgaccagaaaattattgaattcaatacgagatactgagtcgggtcaagtagcagtcacctcatattatgaatcattagaatatattgatagtcttaagctaaccccacatgtgcctggcacctcatgcattgaggatgatagtctatgtacaaatgattacataatctggatcatagagtctaatgcaaacttggagaagtatccaattccaaatagccctgaggatgattccaatttccataactttaagttgaatgctccatcgcaccataccttacgcccattagggttgtcatcaactgcttggtataagggtataagctgctgcaggtaccttgagcgattaaagctaccacaaggtgatcatttatatattgcagaaggtagtggtgccagtatgacaatcatagaatacctattcccaggaagaaagatatattacaattctttatttagtagtggtgacaatcccccacaaagaaattatgcaccaatgcctactcagttcattgagagtgtcccatacaagctctggcaagcacacacagatcaatatcccgagatttttgaggacttcatccctctatggaacggaaacgccgccatgactgacataggaatgacagcttgtgtagaattcatcatcaatcgagtcggcccaaggacttgcagtttagtacatgtagatttggaatcaagtgcaagcttaaatcaacaatgcctgtcaaagccgataattaatgctatcatcactgctacaactgttttgtgccctcatggggtgcttattctgaaatatagttggttgccatttactagatttagtactttgatcactttcttatggtgctactttgagagaatcactgttcttaggagcacatattctgatccagctaatcatgaggtttatttaatttgtatccttgccaacaactttgcattccagactgtctcgcaggcaacaggaatggcgatgactttaactgatcaagggtttactttgatatcacctgaaagaataaatcagtattgggatggtcacttgaagcaagaacgtatcgtagcagaagcaattgataaggtggttctaggagaaaatgctctatttaattcgagtgataatgaattaattctcaaatgtggagggacaccaaatgcacggaatctcatcgatatcgagccagtcgcaactttcatagaatttgaacaattgatctgcacaatgttgacaacccacttgaaggaaataattgatataacaaggtctggaacccaggattatgaaagtttattactcactccttacaatttaggtcttcttggtaaaatcagtacgatagtgagattattaacagaaaggattctaaatcatactatcaggaattggttgatcctcccaccttcgctccggatgatcgtgaagcaggacttggaattcggcatattcaggattacttccatcctcaattctgatcggttcctgaagctttctccaaataggaaatacttgattgcacaattaactgcaggctacattaggaaattgattgagggggattgcaatatcgatctaaccagacctatccaaaagcaaatctggaaagcattaggttgtgtagtctattgtcacgatccaatggatcaaagggagtcaacagagtttattgatataaatattaatgaagaaatagaccgcgggatcgatggcgaggaaatctaaacatatcaagaatcagaattagtttaagaaaaaagaagaggattaatcttggttttccccttggt

SEQ ID NO: 491 - DNA, 23 bp, Artificial Sequence
  zTAg 604 qPCR forward primer
ccataggcatagggtgagtgcaa

SEQ ID NO: 492 - DNA, 24 bp, Artificial Sequence
  zTAg 698 qPCR reverse primer
gtctctggtcagggctgaatacat

SEQ ID NO: 493 - DNA, 24 bp, Artificial Sequence
  zGALV qPCR forward primer
actgcaaagagtgggactgtgaga

SEQ ID NO: 494 - DNA, 24 bp, Artificial Sequence
  zGALV qPCR reverse primer
ggcattgctgaaatttctgggtcc

SEQ ID NO: 495 - DNA, 24 bp, Artificial Sequence
  RSV-5' reverse sequencing primer
agccgggcgaagcagattacaata

SEQ ID NO: 496 - DNA, 24 bp, Artificial Sequence
  Luc-591 forward sequencing primer
tcctctggatctactgggttacct

SEQ ID NO: 497 - DNA, 1404 bp, Artificial Sequence
  Synthetic HSV1-TK transcription unit
gactttgtcccgcccctctcacagatactccaatgatcacttggcggtgttaggaatttggcgcgtaaaagtggccgggactttgtagtcagttccattcagggggcggagtagaccatggccagttacccctgtcatcagcatgcttctgcatttgatcaggctgcaaggtccagaggacactccaacagaaggacagctctcagacctagaaggcagcaggaagccacagaggtcagattggaacagaagatgcctaccctgctgagagtgtacattgatggacctcatgggatgggtaaaactacaactacacaactgctggttgccttgggcagtagggatgatattgtgtatgtgccagagcccatgacctattggcaggtgcttggggccagtgagactatagcaaatatctacacaactcagcacagacttgaccagggagagatttctgctggagatgcagctgtggttatgacttctgcccagatcaccatggggatgccctatgctgtgacagatgcagtcctggctccacatgtgggaggtgaagcaggcagctcccatgcacctccaccagccctgaccctgatttttgacaggcatcccattgctgcactgctttgctacccagcagctaggtacctgatgggcagcatgacaccacaggctgtgcttgcatttgtggcccttatccctccaacactgcctggcacaaacattgtgctgggggccctgccagaagataggcacatagacagactggccaaaaggcagagacctggagagagattggacctggctatgcttgcagctatcagaagggtctatggcctgctggccaatacagtaagatacttgcaggggggaggttcctggtgggaggactgggggcagctgtctggtacagcagttcctccacagggagcagaacctcagtctaatgctggacccagaccccatattggagacaccctcttcactctctttagagctcctgaactgcttgctcctaatggagatttgtacaatgtttttgcctgggctcttgatgtcctggctaagagactcaggccaatgcatgttttcattctggactatgaccaaagccctgcaggatgcagggatgccttgctccaactgacttctggcatggtacagactcatgttacaacaccaggctccattccaacaatatgtgatctggccagaacttttgctagggagatgggggaggcaaattgagcactgcatggacttacctgcctggtggtatcagtcacaggctctgataaggattcagctgttgtataaataaagcatgcagcctagcaggaaccatgttaatctctcttggttgtttccttggaatactcctaagcacattaggtttttagatct

SEQ ID NO: 498 - DNA, 1131 bp, Herpes simplex virus 1
  HSV-1 Thymidine Kinase (TK) gene
atggcttcgtacccctgccatcaacacgcgtctgcgttcgaccaggctgcgcgttctcgcggccatagcaaccgacgtacggcgttgcgccctcgccggcagcaagaagccacggaagtccgcctggagcagaaaatgcccacgctactgcgggtttatatagacggtcctcacgggatggggaaaaccaccaccacgcaactgctggtggccctgggttcgcgcgacgatatcgtctacgtacccgagccgatgacttactggcaggtgctgggggcttccgagacaatcgcgaacatctacaccacacaacaccgcctcgaccagggtgagatatcggccggggacgcggcggtggtaatgacaagcgcccagataacaatgggcatgccttatgccgtgaccgacgccgttctggctcctcatgtcgggggggaggctgggagttcacatgccccgcccccggccctcaccctcatcttcgaccgccatcccatcgccgccctcctgtgctacccggccgcgcgataccttatgggcagcatgaccccccaggccgtgctggcgttcgtggccctcatcccgccgaccttgcccggcacaaacatcgtgttgggggcccttccggaggacagacacatcgaccgcctggccaaacgccagcgccccggcgagcggcttgacctggctatgctggccgcgattcgccgcgtttacgggctgcttgccaatacggtgcggtatctgcagggcggcgggtcgtggtgggaggattggggacagctttcggggacggccgtgccgccccagggtgccgagccccagagcaacgcgggcccacgaccccatatcggggacacgttatttaccctgtttcgggcccccgagttgctggcccccaacggcgacctgtataacgtgtttgcctgggccttggacgtcttggccaaacgcctccgtcccatgcacgtctttatcctggattacgaccaatcgcccgccggctgccgggacgccctgctgcaacttacctccgggatggtccagacccacgtcaccaccccaggctccataccgacgatctgcgacctggcgcgcacgtttgcccgggagatgggggaggctaactga

SEQ ID NO: 499 - DNA, 1131 bp, Artificial Sequence
  Synthetic HSV1-TK gene (human codon optimized, CpG-free)
atggccagttacccctgtcatcagcatgcttctgcatttgatcaggctgcaaggtccagaggacactccaacagaaggacagctctcagacctagaaggcagcaggaagccacagaggtcagattggaacagaagatgcctaccctgctgagagtgtacattgatggacctcatgggatgggtaaaactacaactacacaactgctggttgccttgggcagtagggatgatattgtgtatgtgccagagcccatgacctattggcaggtgcttggggccagtgagactatagcaaatatctacacaactcagcacagacttgaccagggagagatttctgctggagatgcagctgtggttatgacttctgcccagatcaccatggggatgccctatgctgtgacagatgcagtcctggctccacatgtgggaggtgaagcaggcagctcccatgcacctccaccagccctgaccctgatttttgacaggcatcccattgctgcactgctttgctacccagcagctaggtacctgatgggcagcatgacaccacaggctgtgcttgcatttgtggcccttatccctccaacactgcctggcacaaacattgtgctgggggccctgccagaagataggcacatagacagactggccaaaaggcagagacctggagagagattggacctggctatgcttgcagctatcagaagggtctatggcctgctggccaatacagtaagatacttgcaggggggaggttcctggtgggaggactgggggcagctgtctggtacagcagttcctccacagggagcagaacctcagtctaatgctggacccagaccccatattggagacaccctcttcactctctttagagctcctgaactgcttgctcctaatggagatttgtacaatgtttttgcctgggctcttgatgtcctggctaagagactcaggccaatgcatgttttcattctggactatgaccaaagccctgcaggatgcagggatgccttgctccaactgacttctggcatggtacagactcatgttacaacaccaggctccattccaacaatatgtgatctggccagaacttttgctagggagatgggggaggcaaattga

SEQ ID NO: 500 - DNA, 1284 bp, Escherichia coli
  bacterial Cytosine Deaminase (CDase) gene sequence
atgtcaaacaatgcactgcagactattatcaatgctaggctgcctggaaaagaagggctgtggcagattcacctgcaggatgggaaaatcagtgccattgatgcccagtctggagtgatgcctgtcacagaaaattccctggatgcagagcagggactggtgctgccaccttttgtggaaccccacatccatctggataccacacagacagctggccagcctaactggaatcagtctggaactctgtttgagggcattgaaagatgggctgagaggaaggctctgctgacccatgatgatgtgaagcagagggcctggcagacactgaaatggcagattgctaatggcattcagcatgtgagaacccatgtggatgtcagtgatgcaacactgactgctctgaaggcaatgctggaggtgaaacaggaagtggccccctggattgatctgcagattgctgctttccctcaggaaggcatcctgtcttatccaaatggagaggctctgctggaggaggcactgagactgggagcagatgtggttggagctattcctcactttgagtttactagagaatatggagtggagtcactgcataagacctttgccctggctcagaaatatgacagactgattgatgtgcactgtgatgaaattgatgatgagcagagcaggtttgtggaaacagtggcagccctggcccatagagagggaatgggagcaagagtgactgcctctcacactactgctatgcatagttacaatggggcatatacctcaagactgttcaggctgctgaagatgagtggaatcaactttgtggctaaccccctggtgaacattcacctgcagggcaggtttgatacttatccaaagaggagagggatcaccagagtgaaagagatgctggaatctggcatcaatgtgtgctttgggcatgatgatgtctgtggaccatggtatcccctgggcacagccaacatgctgcaggtgctgcacatgggcctgcatgtgtgtcagctgatggggtatggacagatcaatgatgggctgaacctgattacccaccattctgctaggacactgaatctgcaggactatggcattgctgcagggaacagtgcaaatctgatcattctgccagcagagaatggatttgatgcactgaggagacaggtgcctgtcaggtacagtgtgagaggagggaaagtcattgcctccacacagccagctcagaccacagtctacctggaacagcctgaagccattgattacaagaggtga

SEQ ID NO: 501 - protein, 376 aa, Herpes simplex virus
  Thymidine Kinase (HSV1-TK) protein sequence
MASYPCHQHASAFDQAARSRGHSNRRTALRPRRQQEATEVRLEQKMPTLLRVYIDGPHGMGKTTTTQLLVALGSRDDIVYVPEPMTYWQVLGASETIANIYTTQHRLDQGEISAGDAAVVMTSAQITMGMPYAVTDAVLAPHVGGEAGSSHAPPPALTLIFDRHPIAALLCYPAARYLMGSMTPQAVLAFVALIPPTLPGTNIVLGALPEDRHIDRLAKRQRPGERLDLAMLAAIRRVYGLLANTVRYLQGGGSWWEDWGQLSGTAVPPQGAEPQSNAGPRPHIGDTLFTLFRAPELLAPNGDLYNVFAWALDVLAKRLRPMHVFILDYDQSPAGCRDALLQLTSGMVQTHVTTPGSIPTICDLARTFAREMGEAN

SEQ ID NO: 502 - protein, 427 aa, Escherichia coli
MSNNALQTIINARLPGKEGLWQIHLQDGKISAIDAQSGVMPVTENSLDAEQGLVLPPFVEPHIHLDTTQTAGQPNWNQSGTLFEGIERWAERKALLTHDDVKQRAWQTLKWQIANGIQHVRTHVDVSDATLTALKAMLEVKQEVAPWIDLQIAAFPQEGILSYPNGEALLEEALRLGADVVGAIPHFEFTREYGVESLHKTFALAQKYDRLIDVHCDEIDDEQSRFVETVAALAHREGMGARVTASHTTAMHSYNGAYTSRLFRLLKMSGINFVANPLVNIHLQGRFDTYPKRRGITRVKEMLESGINVCFGHDDVCGPWYPLGTANMLQVLHMGLHVCQLMGYGQINDGLNLITHHSARTLNLQDYGIAAGNSANLIILPAENGFDALRRQVPVRYSVRGGKVIASTQPAQTTVYLEQPEAIDYKR

SEQ ID NO: 503 - DNA, 340 bp, Artificial Sequence
  DNA stretch containing bacterial promoter for Kan/NeoR gene
  promoter (62)...(90)
caggtggcacttttcggggaaatgtgcgcggaacccctatttgtttatttttctaaatacattcaaatatgtatccgctcatgagacaataaccctgataaatgcttcaataatattgaaaaaggaagagtcctgaggcggaaagaaccagctgtggaatgtgtgtcagttagggtgtggaaagtccccaggctccccagcaggcagaagtatgcaaagcatgcatctcaattagtcagcaaccaggtgtggaaagtccccaggctccccagcaggcagaagtatgcaaagcatgcatctcaattagtcagcaaccatagtcccgcccctaactccgccc

SEQ ID NO: 504 - DNA, 589 bp, Artificial Sequence
  CMV immediate early promoter
tagttattaatagtaatcaattacggggtcattagttcatagcccatatatggagttccgcgttacataacttacggtaaatggcccgcctggctgaccgcccaacgacccccgcccattgacgtcaataatgacgtatgttcccatagtaacgccaatagggactttccattgacgtcaatgggtggagtatttacggtaaactgcccacttggcagtacatcaagtgtatcatatgccaagtacgccccctattgacgtcaatgacggtaaatggcccgcctggcattatgcccagtacatgaccttatgggactttcctacttggcagtacatctacgtattagtcatcgctattaccatggtgatgcggttttggcagtacatcaatgggcgtggatagcggtttgactcacggggatttccaagtctccaccccattgacgtcaatgggagtttgttttggcaccaaaatcaacgggactttccaaaatgtcgtaacaactccgccccattgacgcaaatgggcggtaggcgtgtacggtgggaggtctatataagcagagctggtttagtgaaccgtcagatc

SEQ ID NO: 505 - DNA, 117 bp, Artificial Sequence
  Sythetic cell cycle-dependent promoter
gactttgtcccgcccctctcacagatactccaatgatcacttggcggtgttaggaatttggcgcgtaaaagtggccgggactttgtagtcagttccattcagggggcggagtagacc

SEQ ID NO: 506 - DNA, 362 bp, Homo sapiens
  E2F-1 5' untranslated region (contains promoter)
  ref <308>: DATABASE ACCESSION NUMBER: GenBank: S79170.1
  ref <309>: DATABASE ENTRY DATE: 1995-10-30
ggggagtcagaccgcgcctggtaccatccggacaaagcctgcgcgcgccccgccccgccattggccgtaccgccccgcgccgccgccccatctcgcccctcgccgccgggtccggcgcgttaaagccaataggaaccgccgccgttgttcccgtcacggccggggcagccaattgtggcggcgctcggcggctcgtggctctttcgcggcaaaaaggatttggcgcgtaaaagtggccgggactttgcaggcagcggcggccgggggcggagcgggatcgagccctcgccgaggcctgccgccatgggcccgcgccgccgccgccgcctgtcacccgggccgcgcgggccgtgagcgtcatg

SEQ ID NO: 507 - DNA, 7 bp, Artificial Sequence
  Sp1 Binding Motif 1
ccgcccc

SEQ ID NO: 508 - DNA, 7 bp, Artificial Sequence
  Sp1 Binding Motif 2
ggggcgg

SEQ ID NO: 509 - DNA, 5 bp, Artificial Sequence
  CAT BOX Binding Motif
ccaat

SEQ ID NO: 510 - DNA, 13 bp, Artificial Sequence
  NF kappa-B Binding Motif
ccgggactttgca

SEQ ID NO: 511 - DNA, 12 bp, Artificial Sequence
  E2F Binding Motif 1
tttcgcggcaaa

SEQ ID NO: 512 - DNA, 13 bp, Artificial Sequence
  E2F Binding Motif 2
tttggcgcgtaaa

SEQ ID NO: 513 - DNA, 4 bp, Artificial Sequence
  CHR Binding Motif 1
agga

SEQ ID NO: 514 - DNA, 4 bp, Artificial Sequence
  CHR Binding Motif 2
gtgg

SEQ ID NO: 515 - DNA, 6 bp, Artificial Sequence
  TLR9 binding motif core (human)
gtcgtt

SEQ ID NO: 516 - DNA, 6 bp, Artificial Sequence
  TLR9 binding motif core (mouse) 1
aacgtt

SEQ ID NO: 517 - DNA, 6 bp, Artificial Sequence
  TLR9 binding motif core (mouse) 2
gacgtt

SEQ ID NO: 518 - DNA, 6 bp, Artificial Sequence
  TLR9 binding motif core (mouse) 3
aacgtc

SEQ ID NO: 519 - DNA, 179 bp, Homo sapiens
  Cyc A promoter
  ref <308>: DATABASE ACCESSION NUMBER: GenBank: X68303.1
  ref <309>: DATABASE ENTRY DATE: 2006-11-14
ggtgcgagtggtcggctgggcagagtgcacgctgcttggcgccgcaggctgatcccgccgtccactcccgggagcagtgatgttgggcaactctgcgccggggcctgcgacccgcgaggcgggctcggcgctgctagcattgcagcagacggcgctccaagaggaccaggagaatatca

SEQ ID NO: 520 - DNA, 852 bp, Homo sapiens
  Cdc2 promoter region
  ref <308>: DATABASE ACCESSION NUMBER: GenBank: D32223.1
  ref <309>: DATABASE ENTRY DATE: 2008-08-26
cagctgcgctggaggctgaggccgattgcttgagcccaggatttggaggccagcatgcgcaacataatgagacccagtctctaaatgcatgcctctctatatattaaaattctgatgtgaaaatattttaaaatttaatacatttcaaatgtttttaattgtataataaacaaaatgtaaataataaaataatttaatattaaattcaaaaatgaggtagaaacaaagcacagcgatataaataataaattttcctttacatttttgaggcggtcttttgagttttggatttccttcttaggtcactgaaatgtgctccttggagccagcccgcaaatcacgcatttagaaaaacataactatacactcctaaccctaagtattagaagtgaaagtaatggaatctcgatgtaaacacaatatcacttttttgtagagctattttgagtataataaatttgaactgtgccaatgctgggagaaaaaatttaaaagaagaacggagcgaacagtagcttcctcgtccgctgactagaaacagtaggacgacactctcccgactggaggagagcgcttgcgctcgcactcagttggcgcccgccctcctgctttttctctagccgccctttcctctttctttcgcgctctagccacccgggaaggcactgcggtagctgggctctgattggctgctttgaaagtctacgggctacccgattggtgaatccggggccctttagcgcggtgagtttgaaactgctcgcacttggcttcaaagctggctcttggaaattgagcggagagcgacgcggttgttgtagctcgctgcggccgccgcggaataataagccg

SEQ ID NO: 521 - DNA, 2000 bp, Homo sapiens
  Cdc25 promoter region
  ref <308>: DATABASE ACCESSION NUMBER: GenBank: Z29077.1
  ref <309>: DATABASE ENTRY DATE: 1995-10-30
ttgcatgcctgcaggtatacaatttcccacaaagtgtgattatactgtagtcgtcaaagcagataacaactcatcccacactcccttaatccccagcctgatttcaaactcacctggcatagcaaggttctgtgctaactcctacactcactgtctgtatcctagaggacaaagaatcttcacacatctcctttctggggaagcaggttctgcagatgaaaagggtattaggataaaaaccagctggctacactgtgcctctcagccactaccaccaccaagatcctgacaacagacacaagttgcattttgacttttgtttctcaaagcatgatctgcaagccgtctgcatgggtagcacctgggggccttgataatgaccccactttagacctatcgaattatcgtttttggagcctacatcttaaagagcttccaaggttattttgaacatttttattatggaaattttcaaatatacattgaagtaagaagtatggggtaataccttaccacgcaaagtatggtcgtaggacagctacctcaccatcagctgggggcttgttagaagggcagaatcttgggccgcaaccgcaacccagacatcccgaatcagaatctgcatttagcaggtcctcaggtggttagtgtgcaaattaaaccttgagaagcacagatatatggaccctcctgcccccatcactcaacagtcagggtcaatcttgtatcatcaataccttcccccagcacaggattatttaaaagcaaatccctaacattaggaatgtctttttgtttgtttcactctaatgcccaggctggagtgcagtggcgcaacctctgtctcccgagttcaagcagttctcatgcctcagcctcccaagtagctgggattacaggtgtgtgccaccacaaccggctaaattttgtatttttagtagagacggggtttcatcatgttggccaggctggttttgaacccctgacctcatgtaacctgcccgcctcggcctcccaaagtgctgggattacaggtgtgggccaacgcgtccggccaataatttataaatatcacctcgtcaatgttcaaatttccattaataaccaatctttgaggtcctctggattgcgataaggattataccaagatgatttaattcctccactttccctgcaacggaatttctttttacccacgtgagctagagtctctgagatgctgcacactaaaagaaacaccaaacaaagctcttggaaggggctaatgcctctcagcataaacacacacacccgtctcgccccaacacttgccacgccggcacgaaacgctccatctcccgtggaaggccagcaaaacttagaagaaaacgtccgcgaaaacggcacgagaaagaagcgaagaaaatgaaacgcttacaacaccctccacccaaaataatctctcctagtattaccctagtgaatggacatcactagtaaggcgcggtttaaatctcccggggttcgtggggctgagggaacgaggaaaacagaaagggtgtggagattggtgagagggagagccaatgatgcgccaggctccccgtgaggcggagcttaccccgcagcctgcctaacgctggtgggccaaacactatcctgctctggctatggggcggggcaagtcttaccatttccagagcaagcacacgcccccaggtgatctgcgagcccaacgataggccatgaggccctgggcgcgcgcgcggagattggctgacgcagcttagaggcgagcggggataggttactgggctggcggaaggtttgaatggtcaacgcctgcggctgttgatattcttgctcagaggccgtaactttggccttctgctcagggaagactctgagtccgacgttggcctacccagtcggaaggcagagctgcaatctagttaactacctcctttcccctagatttcctttcattctgctcaagtcttcgcctgtgtccgatccctact

SEQ ID NO: 522 - DNA, 256 bp, Homo sapiens
  B-myb promoter
  ref <308>: DATABASE ACCESSION NUMBER: GenBank: X82032.1
  ref <309>: DATABASE ENTRY DATE: 1995-12-08
ggccgccgcccctgtcctgcagccggccctggagcgtctgggcaggtgccgccccgcaggccccgccccgccccgcccccctggctccgcccctcactcaggcccctcccccggcgcccgcgcgccaggactgggcggcgccgacgcgcttggcgggagatagaaaagtgcttcaacccgcgccggcggcgactgcagttcctgcgagcgaggagcgcgggacctgctgacacgctgacgccttcgagcgcggccc

SEQ ID NO: 523 - DNA, 528 bp, Homo sapiens
  p107 promoter
  ref <308>: DATABASE ACCESSION NUMBER: GenBank: S78664.1
  ref <309>: DATABASE ENTRY DATE: 1995-10-30
ccgcgggcttcatctcccaagagatggactacacctcccagcaggctctgcgcgcgggctgaggatccctccgctctttttctgtcccgccggctgggccccccgcgaccagccaagggccaaggacaggtctttcagaatctgaggtacatcttcttatcacatttccggggagggactgctaggagctccggaggaaaaacggactttttttgaggagaaaagcggaggcagacggtggatgacaacacgtcccgcagctgcagattttcgcgcgctttggcgcaggtggttgtgggtagcgcgcctgggagggagaaagaagtcgggggccgtggcgcgcagcccgcggggcctgaagggatgttcgaggacaagccccacgctgagggggcggcggtggtcgccgcagccggggaggcgctacaggccctgtgccaggagctgaacctggacgaggggagcgcggccgaagccctggacgactttactgccatccgaggcaactacagcctagaggtgagcggc

SEQ ID NO: 524 - DNA, 6363 bp, Artificial Sequence
  Cloning vector pHCMV-VSV-G, complete sequence
  ref <308>: DATABASE ACCESSION NUMBER: GenBank: AJ318514.1
  ref <309>: DATABASE ENTRY DATE: 2002-01-23
gagcttggcccattgcatacgttgtatccatatcataatatgtacatttatattggctcatgtccaacattaccgccatgttgacattgattattgactagttattaatagtaatcaattacggggtcattagttcatagcccatatatggagttccgcgttacataacttacggtaaatggcccgcctggctgaccgcccaacgacccccgcccattgacgtcaataatgacgtatgttcccatagtaacgccaatagggactttccattgacgtcaatgggtggagtatttacggtaaactgcccacttggcagtacatcaagtgtatcatatgccaagtacgccccctattgacgtcaatgacggtaaatggcccgcctggcattatgcccagtacatgaccttatgggactttcctacttggcagtacatctacgtattagtcatcgctattaccatggtgatgcggttttggcagtacatcaatgggcgtggatagcggtttgactcacggggatttccaagtctccaccccattgacgtcaatgggagtttgttttggcaccaaaatcaacgggactttccaaaatgtcgtaacaactccgccccattgacgcaaatgggcggtaggcgtgtacggtgggaggtctatataagcagagctcgtttagtgaaccgtcagatcgcctggagacgccatccacgctgttttgacctccatagaagacaccgggaccgatccagcctccggtcgaccgatcctgagaacttcagggtgagtttggggacccttgattgttctttctttttcgctattgtaaaattcatgttatatggagggggcaaagttttcagggtgttgtttagaatgggaagatgtcccttgtatcaccatggaccctcatgataattttgtttctttcactttctactctgttgacaaccattgtctcctcttattttcttttcattttctgtaactttttcgttaaactttagcttgcatttgtaacgaatttttaaattcacttttgtttatttgtcagattgtaagtactttctctaatcacttttttttcaaggcaatcagggtatattatattgtacttcagcacagttttagagaacaattgttataattaaatgataaggtagaatatttctgcatataaattctggctggcgtggaaatattcttattggtagaaacaactacaccctggtcatcatcctgcctttctctttatggttacaatgatatacactgtttgagatgaggataaaatactctgagtccaaaccgggcccctctgctaaccatgttcatgccttcttctctttcctacagctcctgggcaacgtgctggttgttgtgctgtctcatcattttggcaaagaattcctcgacggatccgccatgaagtgccttttgtacttagcctttttattcattggggtgaattgcaagttcaccatagtttttccacacaaccaaaaaggaaactggaaaaatgttccttctaattaccattattgcccgtcaagctcagatttaaattggcataatgacttaataggcacagccttacaagtcaaaatgcccaagagtcacaaggctattcaagcagacggttggatgtgtcatgcttccaaatgggtcactacttgtgatttccgctggtatggaccgaagtatataacacattccatccgatccttcactccatctgtagaacaatgcaaggaaagcattgaacaaacgaaacaaggaacttggctgaatccaggcttccctcctcaaagttgtggatatgcaactgtgacggatgccgaagcagtgattgtccaggtgactcctcaccatgtgctggttgatgaatacacaggagaatgggttgattcacagttcatcaacggaaaatgcagcaattacatatgccccactgtccataactctacaacctggcattctgactataaggtcaaagggctatgtgattctaacctcatttccatggacatcaccttcttctcagaggacggagagctatcatccctgggaaaggagggcacagggttcagaagtaactactttgcttatgaaactggaggcaaggcctgcaaaatgcaatactgcaagcattggggagtcagactcccatcaggtgtctggttcgagatggctgataaggatctctttgctgcagccagattccctgaatgcccagaagggtcaagtatctctgctccatctcagacctcagtggatgtaagtctaattcaggacgttgagaggatcttggattattccctctgccaagaaacctggagcaaaatcagagcgggtcttccaatctctccagtggatctcagctatcttgctcctaaaaacccaggaaccggtcctgctttcaccataatcaatggtaccctaaaatactttgagaccagatacatcagagtcgatattgctgctccaatcctctcaagaatggtcggaatgatcagtggaactaccacagaaagggaactgtgggatgactgggcaccatatgaagacgtggaaattggacccaatggagttctgaggaccagttcaggatataagtttcctttatacatgattggacatggtatgttggactccgatcttcatcttagctcaaaggctcaggtgttcgaacatcctcacattcaagacgctgcttcgcaacttcctgatgatgagagtttattttttggtgatactgggctatccaaaaatccaatcgagcttgtagaaggttggttcagtagttggaaaagctctattgcctcttttttctttatcatagggttaatcattggactattcttggttctccgagttggtatccatctttgcattaaattaaagcacaccaagaaaagacagatttatacagacatagagatgaaccgacttggaaagtgataaggatccgtcgaggaattcactcctcaggtgcaggctgcctatcagaaggtggtggctggtgtggccaatgccctggctcacaaataccactgagatctttttccctctgccaaaaattatggggacatcatgaagccccttgagcatctgacttctggctaataaaggaaatttattttcattgcaatagtgtgttggaattttttgtgtctctcactcggaaggacatatgggagggcaaatcatttaaaacatcagaatgagtatttggtttagagtttggcaacatatgcccatatgctggctgccatgaacaaaggttggctataaagaggtcatcagtatatgaaacagccccctgctgtccattccttattccatagaaaagccttgacttgaggttagattttttttatattttgttttgtgttatttttttctttaacatccctaaaattttccttacatgttttactagccagatttttcctcctctcctgactactcccagtcatagctgtccctcttctcttatggagatccctcgacggatcggccgcaattcgtaatcatgtcatagctgtttcctgtgtgaaattgttatccgctcacaattccacacaacatacgagccggaagcataaagtgtaaagcctggggtgcctaatgagtgagctaactcacattaattgcgttgcgctcactgcccgctttccagtcgggaaacctgtcgtgccagctgcattaatgaatcggccaacgcgcggggagaggcggtttgcgtattgggcgctcttccgcttcctcgctcactgactcgctgcgctcggtcgttcggctgcggcgagcggtatcagctcactcaaaggcggtaatacggttatccacagaatcaggggataacgcaggaaagaacatgtgagcaaaaggccagcaaaaggccaggaaccgtaaaaaggccgcgttgctggcgtttttccataggctccgcccccctgacgagcatcacaaaaatcgacgctcaagtcagaggtggcgaaacccgacaggactataaagataccaggcgtttccccctggaagctccctcgtgcgctctcctgttccgaccctgccgcttaccggatacctgtccgcctttctcccttcgggaagcgtggcgctttctcatagctcacgctgtaggtatctcagttcggtgtaggtcgttcgctccaagctgggctgtgtgcacgaaccccccgttcagcccgaccgctgcgccttatccggtaactatcgtcttgagtccaacccggtaagacacgacttatcgccactggcagcagccactggtaacaggattagcagagcgaggtatgtaggcggtgctacagagttcttgaagtggtggcctaactacggctacactagaagaacagtatttggtatctgcgctctgctgaagccagttaccttcggaaaaagagttggtagctcttgatccggcaaacaaaccaccgctggtagcggtggtttttttgtttgcaagcagcagattacgcgcagaaaaaaaggatctcaagaagatcctttgatcttttctacggggtctgacgctcagtggaacgaaaactcacgttaagggattttggtcatgagattatcaaaaaggatcttcacctagatccttttaaattaaaaatgaagttttaaatcaatctaaagtatatatgagtaaacttggtctgacagttaccaatgcttaatcagtgaggcacctatctcagcgatctgtctatttcgttcatccatagttgcctgactccccgtcgtgtagataactacgatacgggagggcttaccatctggccccagtgctgcaatgataccgcgagacccacgctcaccggctccagatttatcagcaataaaccagccagccggaagggccgagcgcagaagtggtcctgcaactttatccgcctccatccagtctattaattgttgccgggaagctagagtaagtagttcgccagttaatagtttgcgcaacgttgttgccattgctacaggcatcgtggtgtcacgctcgtcgtttggtatggcttcattcagctccggttcccaacgatcaaggcgagttacatgatcccccatgttgtgcaaaaaagcggttagctccttcggtcctccgatcgttgtcagaagtaagttggccgcagtgttatcactcatggttatggcagcactgcataattctcttactgtcatgccatccgtaagatgcttttctgtgactggtgagtactcaaccaagtcattctgagaatagtgtatgcggcgaccgagttgctcttgcccggcgtcaatacgggataataccgcgccacatagcagaactttaaaagtgctcatcattggaaaacgttcttcggggcgaaaactctcaaggatcttaccgctgttgagatccagttcgatgtaacccactcgtgcacccaactgatcttcagcatcttttactttcaccagcgtttctgggtgagcaaaaacaggaaggcaaaatgccgcaaaaaagggaataagggcgacacggaaatgttgaatactcatactcttcctttttcaatattattgaagcatttatcagggttattgtctcatgagcggatacatatttgaatgtatttagaaaaataaacaaataggggttccgcgcacatttccccgaaaagtgccacctaaattgtaagcgttaatattttgttaaaattcgcgttaaatttttgttaaatcagctcattttttaaccaataggccgaaatcggcaaaatcccttataaatcaaaagaatagaccgagatagggttgagtgttgttccagtttggaacaagagtccactattaaagaacgtggactccaacgtcaaagggcgaaaaaccgtctatcagggcgatggcccactacgtgaaccatcaccctaatcaagttttttggggtcgaggtgccgtaaagcactaaatcggaaccctaaagggagcccccgatttagagcttgacggggaaagccggcgaacgtggcgagaaaggaagggaagaaagcgaaaggagcgggcgctagggcgctggcaagtgtagcggtcacgctgcgcgtaaccaccacacccgccgcgcttaatgcgccgctacagggcgcgtcccattcgccattcaggctgcgcaactgttgggaagggcgatcggtgcgggcctcttcgctattacgccagctggcgaaagggggatgtgctgcaaggcgattaagttgggtaacgccagggttttcccagtcacgacgttgtaaaacgacggccagtgagcgcgcgtaatacgactcactatagggcgaattggagctccaccgcggtggcggccgctctaga

SEQ ID NO: 525 - DNA, 1643 bp, Avian orthoreovirus strain S1133
  Avian reovirus strain S1133 segment S1, complete sequence
  ref <308>: DATABASE ACCESSION NUMBER: GenBank: AF330703.1
  ref <309>: DATABASE ENTRY DATE: 2002-03-15
gctttttcaatcccttgttcgtcgatgctgcgtatgcctcccggttcatgtaacggtgcgactgctgtatttggtaacgttcattgtcaggcagctcagaacacggcaggtggtgatttgcaagctacgtcatccataattgcatattggccttatctagcggcgggtggtggtttcttattaattgttatcattttcgctcttctatactgttgtaaggctaagatcaaggcggacgctgcacgtagtgtcttccatcgtgagctggtagcgttgagttctggtaagcacaatgcaatggctccgccatacgacgtttgaagtgcaacgatttaatttctgtccgctatcacttcgcgaacttgctatcccatcatttactgctataactggggctgacccatcacagtattttaacattgagctcccacacactcatcctctctattccaaattgcctactctgttatctcaaccttgtagggtccacgtgcggctgattcgccggttcgctctctattcaacattgtcaagtatttgtgagtacgattgtgctctactattctccccacacgctatcgttccattgcctgcatccgatcggcggtcttgtcttatagttcattgggatggcgggtctcaatccatcgcagcgaagagaggtcgtcagcttgatactgtcattgacttcgaacgtgaatataagtcatggcgatttgacgccgatctatgaacggctgaccaatctagaagcgtctacggagttattacatcgctccatttccgatatatccactactgtctcaaatatttctgcaaatttacaagacatgacccatacattggatgatgtaactgctaatttagacggtttgaggaccactgttactgcacttcaggattccgtctccattctgtctacaaatgtgactgacttaacgaacagatcctctgcgcacgcggcgatactatcttcacttcagactacggttgacggaaactccactgccatctccaatttgaagagtgatatctcgtcgaacggtttagctattacagatctgcaggatcgtgttaaatcattggagtctaccgcgagtcatggtctatctttttcgcctccgcttagtgtcgctgacggcgtggtttcattagacatggacccctacttctgttctcaacgagtttctttaacatcatactcggcggaggctcaactaatgcaatttcggtggatggcacggggtactaacggatcatctgataccattgacatgaccgttaacgctcactgtcatggaagacgcactgattatatgatgtcgtccacgggaaatctcacggtcactagtaacgtcgtgttattaaccttcgatttaagtgacataacgcatatcccatcagacctagcacgtcttgttcccagtgcgggattccaagctgcgtcgttccctgtggacgtatcattcacccgcgattctgcgactcatgcgtaccaagcgtatggggtgtactcgagctcacgtgtcttcacaattactttcccaaccggaggtgatggtacagcgaacattcgttccttgaccgtgcgtaccggcatcgacacctaaggtgtggcgccgtactgggattggttattcatc

SEQ ID NO: 526 - DNA, 613 bp, Homo sapiens
  TK promoter region
  ref <308>: DATABASE ACCESSION NUMBER: GenBank: M13643.1
  ref <309>: DATABASE ENTRY DATE: 1995-01-14
ccccagctaactccgccccagccccttagtccctccctgcaatccacctacctctgcagcacatcttcttccaaggaaccttgcttgggcaaacccacaccagacacatccatcatggcgtctacagccgcatgggcgtgcgtccctctgtttatatggccagagcccgcctcgctcgcccctttaaacttggtgggcggaccgaggcggggcctcagatccaggccccaccccgatcagccacgtccatcgccctgatttccaggccctcccagtccctgggcgcacgtcccggattcctcccacgagggggcgggctgcggcaaatctcccgccagtcagcggccgggcgctgattggccccatggcggcggggcggctcgtgattggccagcacgccgtggtttaaagcggtcggcgcggtgaaccaggggcttactgcgggacggccttggagagtactcgggttcgtgaacttcccggaggcgcaatgagctgcattaacctgcccactgtgctgcccggctcccccagcaagacccgggggcagatccaggtgcgggggccagcctgcgcgtggctgggatgaggtgtcgtgtatacctttcagatc

SEQ ID NO: 527 - DNA, 1207 bp, Homo sapiens
  DNA pol alpha promoter region
  ref <308>: DATABASE ACCESSION NUMBER: GenBank: X66868.1
  ref <309>: DATABASE ENTRY DATE: 1992-10-06
aagcttgataataaaactataaaacttccatcagtttttaaaagggaagtgtaggaataaatctgtcgtagtactttaaataggaagttatgtctaagtgtaaattactacatgttatgtatcacaacatatggatcacataacatgatattaaatgattatgaagctgaaagacattttctaaacaatccagaaattaagaaacaagtattgatcaaccatgctagaagacagattgaattatctttatatcctctttggagaaaatattacaaaattgttgtcacatgaagaagggatcaataagcatgtgggcaataatgtaggaaaaaatacaaatgtgtggcaggcattatttaataaaaatgttatacctttttggaaagagataacatgagatgtacacattacagccattgtatcatacacaaaaattgaataccctttttgtttttcataacattgaaattttggagttcacgtcaggtgttttgtagattgtcctacattttgaatacatctgattgtttcttcatggttagattcaggttagacattttttgcaagaagaccatataggcgaagtttttcctttttcatacgcattacatcaggaggcatatgagatcagatggccatttattggtaatgctacttctggttatttggttaagacggagcatatatctttaagttgttaatcacacagccactgtatccagactgctgagaagcaaactatcaggcaaaattcagggcgcgcagcaggaggcagtcgctttcccggctctggggaaaacgatccaaccacgcccactctcctgcccgcccgcgcctcctttccgggaaaatgggctctgagaaccagagcgccctttctcccacgcgcccaaatcttttcccatcagcatgcgtgcggttgcgcagtctccaggcggctcctttccagcgcccgaccgcttctttctcctgctctcctccggcttcccctcagctctagcttttccctaaggggtcatcacaggcgccaaacgcgcgtccgcgggaaggccgggggcggagcgcggcgcggcgcggcacgtcagtggccttccggccggaagtccgcagcctcccgagccgctgattggctttacgtggcgcctgtctcggcccccgcgccagttttgggctggttggcgcggaatcgggagattcgggaccatgg

SEQ ID NO: 528 - DNA, 866 bp, Homo sapiens
  Histone H2A promoter region
  ref <308>: DATABASE ACCESSION NUMBER: GenBank: X00089.1
  ref <309>: DATABASE ENTRY DATE: 2005-04-18
ctagagtgatctatacaccataaaatagagtatttctctacacagccctactaaaggaatgagaaagctgtactccactacatactctggtgtactctggctcagttcttggactcctcttttcttggcgaactcaactggtatgaattcctcacagcctacctccagtcagtataaatacttctctgccttgcgttctaatgtagtttcattacattttcttgtggcgattttcccttcttatcagaagtagttatgtctggtcgcggcaaacaaggcggtaaagctcgcgccaaggcaaagactcggtcttctcgtgcaggtttgcagtttcctgtgggccgagtgcaccgcctgctccgcaaggcacactactccgagcgcgtcggggctggcgccccggtgtatctcgcggcggtgcttgagtacctgaccgccgagatcctagagctggcgggcaatgcggcccgcgacaacaagaagacccgcatcatcccgcgccacctgcaattggccatccgcaatgacgaggagcttaataaacttttggggcgtgtgaccatcgcgcagggtggcgttttgcctaatattcaggcggtgctgctgcctaagaaaactgagagccatcataaggccaagggaaagtgaagagttaacgcttcatgcactgctgtttttctgtcagcagacaaaatcagcctaacagcaaggctcttttcagagccacctacgacttccattaaatgagctgttgtgctttggattatgccgcccataaagatgtttttgaggtgtttttaatggctttgagtgtggcacttttagtaatttgtcctgcagaaattagatccatagaaacctcagga

SEQ ID NO: 529 - DNA, 286 bp, Homo sapiens
  C-myc promoter
gaaaagaaaaaagatcctctctcgctaatctccgcccaccggccctttataatgcgagggtctggacggctgaggacccccgagctgtgctgctcgcggccgccaccgccgggccccggccgtccctggctcccctcctgcctcgagaagggcagggcttctcagaggcttggcgggaaaaagaacggagggagggatcgcgctgagtataaaagccggttttcggggctttatctaactcgctgtagtaattccagcgagaggcagagggagcgagcgggcggcc

SEQ ID NO: 530 - DNA, 1366 bp, Artificial Sequence
  hu Telomerase promoter region (TERT), WT un-modified (from GenBank Accession No. AB018788)
atttacaagacgaggctaacctccagcgagcgtgacagcccagggagggtgcgtggcctgttcaaatgctagctccataaataaagcaatttcctccggcagtttctgaaagtaggaaaggttacatttaaggttgcgtttgttagcatttcagtgtttgccgacctcagctacagcatccctgcatggcctcgggagacccagaagtttctcgccccttagatccaaacttgagcaacccggagtctggattcctgggaagtcctcagctgtcctgcggttgtgccggggccccaggtctggaggggaccatgtgccgtgtggcttctactgctgggctggaagtcgggcctcctagctctgcagtccgaggcttggaggcaggtgcctggaccccgaggctgccctccaccctgtgcgggcgggatgtgaccagatgttggcctcatctgccaaacagagtgccggggcccagggtcaaggccgttgtggctggtgtgaggcgcccggtgcgcggccagcaggagcgcctggctccatttcccaccctttctcgacgggaccgccccggtgggtgattaacagatttggggtggtttgctcatggtggggacccctcgccgcctgagaacctgtaaagagaaatgacgggcctgtgtcagggagcccaagtcgcggggaagtgttgcagggaggcactccgggaggtcccgcgtgcccgtccaggggagcaatgcgtcctcggttcgtccccagccgcgtctacgcgcctccgtcctccccttcacgtccggcattcgtggtgcccggagcccgacgccccgcgtccggacctggaggcagccctgggtctccggatcaggccagcggccaaagggtcgccgcacgcacctgtttcccagggcctccacatcatggcccctccctcgggttaccccacagcctaggccgattcgacctctctccgctggggccctcgctggcgtccctgcaccctgggagcgtgagcggtgcgcgggcggggaaacgcggcccagaaccccgggtccgcccggagcagctgcgctgtcgggccaggccgggctcccagtggattcgcgggcacagacgcccaggaccgcgcttccacgtggcggaggactgggacccgggcaccgtcctgcccccttcaccttccagttccgcttcttccgcgcggaccccgccccgtcccgacccttcccgggtccccggcccagccccttccgggccctcccagcccttccccttcctttccgcggccccgccctctcctcgcggcgcgagtttcaggcagcgctgcgtcctgctgcgcacgtgggaagccctggccccggccacccccgcg

SEQ ID NO: 531 - DNA, 428 bp, Artificial Sequence
  Carcinoembryonic antigen (CEA) promoter
gccctggagagcatggggagacccgggaccctgctgggtttctctgtcacaaaggaaaataatccccctggtgtgacagacccaaggacagaacacagcagaggtcagcactggggaagacaggttgtcctcccaggggatgggggtccatccaccttgccgaaaagatttgtctgaggaactgaaaatagaagggaaaaaagaggagggacaaaagaggcagaaatgagaggggaggggacagaggacacctgaataaagaccacacccatgacccacgtgatgctgagaagtactcctgccctaggaagagactcagggcagagggaggaaggacagcagaccagacagtcacagcagccttgacaaaacgttcctggaactcaagctcttctccacagaggaggacagagcagacagcagagacc

SEQ ID NO: 532 - DNA, 356 bp, Artificial Sequence
  Antigen 33 (A33) 5' untranslated region (promoter) with flanking AseI-NheI sites
attaatctacccctttgtgagcagtctaggactttgtacacctgttaagtagggagaaggcaggggaggtggctggtttaaggggaacttgagggaagtagggaagactcctcttgggacctttggagtaggtgacacatgagcccagccccagctcacctgccaatccagctgaggagctcacctgccaatccagctgaggctgggcagaggtgggtgagaagagggaaaattgcagggacctccagttgggccaggccagaagctgctgtagctttaaccagacagctcagacctgtctggaggctgccagtgacaggttaggtttagggcagagaagaagcaagaccgctagc

SEQ ID NO: 533 - DNA, 1568 bp, Artificial Sequence
  Cyclooxygenase-2 (Cox2) promoter
ttgaggtacctggtgtagttttatttcaggttttatgctgtcattttcctgtaatgctaaggacttaggacataactgaattttctattttccacttcttttctggtgtgtgtgtatatatatatgtatatatacacacacacatgtacatatatatattttttagtatctcaccctcacatgctcctccctgagcactacccatgatagatgttaaacaaaagcaaagatgaaattccaactgtcaaaatctcccttccatctaattaattcctcatccaactatgttccaaaacgagaatagaaaattagccccaataagcccaggcaactgaaaagtaaatgctatgttgtactttgatccatggtcacaactcataatcttggaaaagtggacagaaaagacaaaagagtgaactttaaaactcgaatttattttaccagtatctcctatgaagggctagtaaccaaaataatccacgcatcagggagagaaatgccttaaggcatacgttttggacatttagcgtccctgcaaattctggccatcgccgcttcctttgtccatcagaaggcaggaaactttatattggtgacccgtggagctcacattaactatttacagggtaactgcttaggaccagtattatgaggagaatttacctttcccccctctctttccaagaaacaaggagggggtgaaggtacggagaacagtatttcttctgttgaaagcaacttagctacaaagataaattacagctatgtacactgaaggtagctatttcattccacaaaataagagttttttaaaaagctatgtatgtatgtgctgcatatagagcagatatacagcctattaagcgtcgtcactaaaacataaaacatgtcagcctttcttaaccttactcgccccagtctgtcccgacgtgacttcctcgaccctctaaagacgtacagaccagacacggcggcggcggcgggagaggggattccctgcgcccccggacctcagggccgctcagattcctggagaggaagccaagtgtccttctgccctcccccggtatcccatccaaggcgatcagtccagaactggctctcggaagcgctcgggcaaagactgcgaagaagaaaagacatctggcggaaacctgtgcgcctggggcggtggaactcggggaggagagggagggatcagacaggagagtggggactaccccctctgctcccaaattggggcagcttcctgggtttccgattttctcatttccgtgggtaaaaaaccctgcccccaccgggcttacgcaatttttttaaggggagaggagggaaaaatttgtggggggtacgaaaaggcggaaagaaacagtcatttcgtcacatgggcttggttttcagtcttataaaaaggaaggttctctcggttagcgaccaattgtcatacgacttgcagtgagcgtcaggagcacgtccaggaactcctcagcagcgcctccttcagctccacagccagacgccctcagacagcaaagcctacccccgcgccgcgccctgcccgccgctgt

SEQ ID NO: 534 - DNA, 267 bp, Artificial Sequence
  Synthesized E2F1 promoter WT (from GenBank Accession No. S79170)
gcctgcgcgcgccccgccccgccattggccgtaccgccccgcgccgccgccccatctcgcccctcgccgccgggtccggcgcgttaaagccaataggaaccgccgccgttgttcccgtcacggccggggcagccaattgtggcggcgctcggcggctcgtggctctttcgcggcaaaaaggatttggcgcgtaaaagtggccgggactttgcaggcagcggcggccgggggcggagcgggatcgagccctcgccgaggcctgccgcc

SEQ ID NO: 535 - DNA, 267 bp, Artificial Sequence
  Synthesized E2F1 promoter (A262T point mutation)
gcctgcgcgcgccccgccccgccattggccgtaccgccccgcgccgccgccccatctcgcccctcgccgccgggtccggcgcgttaaagccaataggaaccgccgccgttgttcccgtcacggccggggcagccaattgtggcggcgctcggcggctcgtggctctttcgcggcaaaaaggatttggcgcgtaaaagtggccgggactttgcaggcagcggcggccgggggcggagcgggatcgagccctcgccgtggcctgccgcc

SEQ ID NO: 536 - DNA, 267 bp, Artificial Sequence
  Synthesized E2F1 promoter (TCG motifs removed)
gcctgcgcgcgccccgccccgccattggccgtaccgccccgcgccgccgccccatcacgccccttgccgccgggtccggcgcgttaaagccaataggaaccgccgccgttgttcccgtcacggccggggcagccaattgtggcggcgcccggcggcccgtggctctttggcgggagataggatttggcgcgtaaaagtggccgggactttgcaggcagcggcggccgggggcggagcgggaccgcgcccccgccgaggcctgccgcc

SEQ ID NO: 537 - DNA, 267 bp, Artificial Sequence
  Synthesized E2F1 promoter (A262T point mutation; TCG motifs removed)
gcctgcgcgcgccccgccccgccattggccgtaccgccccgcgccgccgccccatcacgccccttgccgccgggtccggcgcgttaaagccaataggaaccgccgccgttgttcccgtcacggccggggcagccaattgtggcggcgcccggcggcccgtggctctttggcgggagataggatttggcgcgtaaaagtggccgggactttgcaggcagcggcggccgggggcggagcgggaccgcgcccccgccgtggcctgccgcc

SEQ ID NO: 538 - DNA, 204 bp, Artificial Sequence
  E2F1-Syn216
tgccaattgggtaaacccgccccgtgatgccgccccttggctccaatttggtcccaccgccccacaggaaccgcccctaagtccaatgtctgacacaacattccgccccactgacacaacctccaatgatcacttggcggagataggaatttggcgcgtaaaagtggccgggactttgcaggcagatccattctgggggcggag

SEQ ID NO: 539 - DNA, 134 bp, Artificial Sequence
  E2F1-Syn141
ccgcccctaagtccaatgtctgacacaacattccgccccactgacacaacctccaatgatcacttggcggagataggaatttggcgcgtaaaagtggccgggactttgcaggcagatccattctgggggcggag

SEQ ID NO: 540 - DNA, 102 bp, Artificial Sequence
  E2F1-Syn109
ccgccccactgacacaacctccaatgatcacttggcggagataggaatttggcgcgtaaaagtggccgggactttgcaggcagatccattctgggggcggag

SEQ ID NO: 541 - DNA, 68 bp, Artificial Sequence
  E2F1-Syn63
attaatatttggcgcgtaaaagtggccgggactttgcaggcagatccattctgggggcggaggctagc

SEQ ID NO: 542 - DNA, 32 bp, Artificial Sequence
  Synthetic linker with 5' AseI and 3' NheI restriction sites
attaatgggtagagtaggctgtctgtgctagc

SEQ ID NO: 543 - DNA, 720 bp, Artificial Sequence
  EGFP (unmodified)
atggtgagcaagggcgaggagctgttcaccggggtggtgcccatcctggtcgagctggacggcgacgtaaacggccacaagttcagcgtgtccggcgagggcgagggcgatgccacctacggcaagctgaccctgaagttcatctgcaccaccggcaagctgcccgtgccctggcccaccctcgtgaccaccctgacctacggcgtgcagtgcttcagccgctaccccgaccacatgaagcagcacgacttcttcaagtccgccatgcccgaaggctacgtccaggagcgcaccatcttcttcaaggacgacggcaactacaagacccgcgccgaggtgaagttcgagggcgacaccctggtgaaccgcatcgagctgaagggcatcgacttcaaggaggacggcaacatcctggggcacaagctggagtacaactacaacagccacaacgtctatatcatggccgacaagcagaagaacggcatcaaggtgaacttcaagatccgccacaacatcgaggacggcagcgtgcagctcgccgaccactaccagcagaacacccccatcggcgacggccccgtgctgctgcccgacaaccactacctgagcacccagtccgccctgagcaaagaccccaacgagaagcgcgatcacatggtcctgctggagttcgtgaccgccgccgggatcactctcggcatggacgagctgtacaagtaa

SEQ ID NO: 544 - protein, 239 aa, Artificial Sequence
  EGFP (unmodified)
MVSKGEELFTGVVPILVELDGDVNGHKFSVSGEGEGDATYGKLTLKFICTTGKLPVPWPTLVTTLTYGVQCFSRYPDHMKQHDFFKSAMPEGYVQERTIFFKDDGNYKTRAEVKFEGDTLVNRIELKGIDFKEDGNILGHKLEYNYNSHNVYIMADKQKNGIKVNFKIRHNIEDGSVQLADHYQQNTPIGDGPVLLPDNHYLSTQSALSKDPNEKRDHMVLLEFVTAAGITLGMDELYK

SEQ ID NO: 545 - DNA, 720 bp, Artificial Sequence
  EGFP (human codon optimized, CpG-free)
atggtgagcaagggagaggaactctttacaggtgtggtcccaattctggtggagctggatggagatgtgaatgggcacaaattttctgtcagtggagagggagagggggatgctacctatggcaaactgactctgaagttcatctgcactactggcaagctgcctgtgccatggccaactctggtgacaaccctcacctatggagtccagtgcttttccagatatcctgaccacatgaaacagcatgactttttcaaatctgcaatgcctgagggctatgtgcaagagagaactatctttttcaaggatgatgggaactataagactagggctgaggtgaaatttgaaggagacaccctggtcaataggattgagctcaaggggattgacttcaaggaggatggcaacattctgggccataagctggagtataattacaattcccacaatgtctacattatggctgacaagcagaagaatggcattaaggtcaacttcaagattagacacaacatagaggatggatctgtgcagctggctgaccattaccagcagaatacacctattggggatgggccagtgctgctccctgacaatcactatctgagcacccaatctgctttgtctaaagatcctaatgaaaagagagatcacatggtgctgctggagtttgtaactgctgcaggaattaccttgggtatggatgaactctataagtaa

SEQ ID NO: 546 - protein, 239 aa, Artificial Sequence; identical to SEQ ID NO: 544
  EGFP (human codon optimized, CpG-free)

SEQ ID NO: 547 - DNA, 1653 bp, Artificial Sequence
  Luciferase
atggaagacgccaaaaacataaagaaaggcccggcgccattctatcctctagaggatggaaccgctggagagcaactgcataaggctatgaagagatacgccctggttcctggaacaattgcttttacagatgcacatatcgaggtgaacatcacgtacgcggaatacttcgaaatgtccgttcggttggcagaagctatgaaacgatatgggctgaatacaaatcacagaatcgtcgtatgcagtgaaaactctcttcaattctttatgccggtgttgggcgcgttatttatcggagttgcagttgcgcccgcgaacgacatttataatgaacgtgaattgctcaacagtatgaacatttcgcagcctaccgtagtgtttgtttccaaaaaggggttgcaaaaaattttgaacgtgcaaaaaaaattaccaataatccagaaaattattatcatggattctaaaacggattaccagggatttcagtcgatgtacacgttcgtcacatctcatctacctcccggttttaatgaatacgattttgtaccagagtcctttgatcgtgacaaaacaattgcactgataatgaattcctctggatctactgggttacctaagggtgtggcccttccgcatagaactgcctgcgtcagattctcgcatgccagagatcctatttttggcaatcaaatcattccggatactgcgattttaagtgttgttccattccatcacggttttggaatgtttactacactcggatatttgatatgtggatttcgagtcgtcttaatgtatagatttgaagaagagctgtttttacgatcccttcaggattacaaaattcaaagtgcgttgctagtaccaaccctattttcattcttcgccaaaagcactctgattgacaaatacgatttatctaatttacacgaaattgcttctgggggcgcacctctttcgaaagaagtcggggaagcggttgcaaaacgcttccatcttccagggatacgacaaggatatgggctcactgagactacatcagctattctgattacacccgagggggatgataaaccgggcgcggtcggtaaagttgttccattttttgaagcgaaggttgtggatctggataccgggaaaacgctgggcgttaatcagagaggcgaattatgtgtcagaggacctatgattatgtccggttatgtaaacaatccggaagcgaccaacgccttgattgacaaggatggatggctacattctggagacatagcttactgggacgaagacgaacacttcttcatagttgaccgcttgaagtctttaattaaatacaaaggatatcaggtggcccccgctgaattggaatcgatattgttacaacaccccaacatcttcgacgcgggcgtggcaggtcttcccgacgatgacgccggtgaacttcccgccgccgttgttgttttggagcacggaaagacgatgacggaaaaagagatcgtggattacgtcgccagtcaagtaacaaccgcgaaaaagttgcgcggaggagttgtgtttgtggacgaagtaccgaaaggtcttaccggaaaactcgacgcaagaaaaatcagagagatcctcataaaggccaagaagggcggaaagtccaaattgtaa

SEQ ID NO: 548 - DNA, 1501 bp, Reptilian orthoreovirus
  Region containing coding sequence for fusion protein RRVp14
  ref <308>: DATABASE ACCESSION NUMBER: GenBank: DD038189.1
  ref <309>: DATABASE ENTRY DATE: 2005-11-04
gttatttttttcctcgatgaagccatggggagtggaccctctaatttcgtcaatcacgcacctggagaagcaattgtaaccggtttggagaaaggggcagataaagtagctggaacgatatcacatacgatttgggaagtgatcgccggattagtagccttgctgacattcttagcgtttggcttctggttgttcaagtatctccaaaagagaagagaaagaaggagacaactcactgagttccaaaaacggtatctacggaatagctacaggttgagtgagatccagagacctatatcacagcacgaatacgaagacccatacgagccaccaagtcgtaggaaaccaccccctcctccttatagcacatacgtcaacatcgataatgtctcagccatttagtgatgagcaacggagggccattattaagttatgcttggcatttgctgacggaggaacatcaggagccgatgtagatgagttgatacgtcgcatggcggcattagaggtatcgttagtagagataaggcgagacctgacggttctagatggggatgtagcctctgtaatccgtagactacaggacgctgaggacgcgataacggcattgtccaacgcgatgcaggtggtccaatcacatattgaagagatagttacgcaagttcgaaaacaagtggagcagatagcggctttggagacggcggtgactcagaacacgaaggacatagatagtgtgcgtagcacggtaacggatttaggatccttagtgagtgcagagaaagtgaggttggacggtgtggcgagagatgtgtcgacacagggactgtcaatcactgatttgcaggcgcgagtagctaaattagaaagggaagctgaaccgacgtcgttcgaatggccactgagaaaagatgcgaagagtggattgctatcattgaactgggatccttggttcttagaaacgactgaaatatttggactctcatgggcgcagtctggagttgagatgggagccacaactggacaaggagaatggcatacacaaagtggtgattacttgtacaccgtgagccttaactttaaattctacagatacaggtctatgggagccttttcactctcaaccgggaatgcgttgctgaacggcccaaaggtggagctacgtataccatataccacaggggggactggcctagaaggatctgacctacaaaacatgacgccatcgtccaccacgagatttccgttgacgttcgtgacacgaataacggtaggaggaagtgaatataccatgccaattacggtgacaatacgacgaattagtggtgtggatacaatcgtgctaactccagcggatttgccaggcgccacaagctatccatgttatctgaggggggagtcgatattttactacatgagggctaggcagatgacgtgattgcgtgaagagggactctccccgtaaggtgaagcacgatgggacgtgcgaggaaagctattcatc

SEQ ID NO: 549 - DNA, 699 bp, Artificial Sequence
  mKate2
atggtctctgaactgatcaaagaaaatatgcacatgaaactgtatatggaaggcacagtcaataatcaccacttcaaatgcacctctgagggagaagggaagccatatgaggggacacagactatgaggatcaaagcagtggaaggaggaccactgccttttgcatttgacattctggccaccagcttcatgtatgggtccaagaccttcatcaaccacactcagggcatccctgacttctttaaacagtcattccctgagggcttcacctgggaaagagtgaccacatatgaggatggaggtgtcctgactgccacacaggacacaagcctgcaggatggctgcctgatctataatgtgaagattaggggagtcaacttcccatctaatggccctgtgatgcagaagaaaactctgggctgggaggctagtactgaaaccctgtatcctgcagatggaggactggagggaagggcagatatggctctgaagctggtgggagggggacatctgatctgtaacctgaaaactacctataggtctaagaaacctgccaagaatctgaaaatgccaggcgtgtactatgtggacaggagactggagaggattaaggaagctgataaagagacatatgtggaacagcatgaagtggctgttgcaagatattgtgacctgccatcaaaactgggacacagataa

SEQ ID NO: 550 - DNA, 7 bp, Artificial Sequence
  AseI restriction site
aattaat

SEQ ID NO: 551 - DNA, 6 bp, Artificial Sequence
  BamHI restriction site
ggatcc

SEQ ID NO: 552 - DNA, 6 bp, Artificial Sequence
  BglII restriction site
agatct

SEQ ID NO: 553 - DNA, 6 bp, Artificial Sequence
  BspHI restriction site
tcatga

SEQ ID NO: 554 - DNA, 12 bp, Artificial Sequence
  BstXI restriction site
  misc_feature 4, 5, 6, 7, 8, 9: n = A,T,C or G
ccannnnnntgg

SEQ ID NO: 555 - DNA, 6 bp, Artificial Sequence
  NheI restriction site
gctagc

SEQ ID NO: 556 - DNA, 8 bp, Artificial Sequence
  NotI restriction site
gcggccgc

SEQ ID NO: 557 - DNA, 8 bp, Artificial Sequence
  PacI restriction site
ttaattaa

SEQ ID NO: 558 - DNA, 9 bp, Artificial Sequence
  PflFI restriction site
  misc_feature 4, 5, 6: n = A,T,C or G
gacnnngtc

SEQ ID NO: 559 - DNA, 7 bp, Artificial Sequence
  SexAI restriction site
  misc_feature 4: w = A or T
accwggt

SEQ ID NO: 560 - DNA, 6 bp, Artificial Sequence
  XbaI restriction site
tctaga

SEQ ID NO: 561 - DNA, 2127 bp, Simian virus 40
  SV40 T Antigen (unmodified)
  ref <308>: DATABASE ACCESSION NUMBER: GenBank: J02400.1
  ref <309>: DATABASE ENTRY DATE: 2000-12-14
atggataaagttttaaacagagaggaatctttgcagctaatggaccttctaggtcttgaaaggagtgcctgggggaatattcctctgatgagaaaggcatatttaaaaaaatgcaaggagtttcatcctgataaaggaggagatgaagaaaaaatgaagaaaatgaatactctgtacaagaaaatggaagatggagtaaaatatgctcatcaacctgactttggaggcttctgggatgcaactgagataccaacctatggaactgatgaatgggagcagtggtggaatgcctttaatgaggaaaacctgttttgctcagaagaaatgccatctagtgatgatgaggctactgctgactctcaacattctactcctccaaaaaagaagagaaaggtagaagaccccaaggactttccttcagaattgctaagttttttgagtcatgctgtgtttagtaatagaactcttgcttgctttgctatttacaccacaaaggaaaaagctgcactgctatacaagaaaattatggaaaaatattctgtaacctttataagtaggcataacagttataatcataacatactgttttttcttactccacacaggcatagagtgtctgctattaataactatgctcaaaaattgtgtacctttagctttttaatttgtaaaggggttaataaggaatatttgatgtatagtgccttgactagagatccattttctgttattgaggaaagtttgccaggtgggttaaaggagcatgattttaatccagaagaagcagaggaaactaaacaagtgtcctggaagcttgtaacagagtatgcaatggaaacaaaatgtgatgatgtgttgttattgcttgggatgtacttggaatttcagtacagttttgaaatgtgtttaaaatgtattaaaaaagaacagcccagccactataagtaccatgaaaagcattatgcaaatgctgctatatttgctgacagcaaaaaccaaaaaaccatatgccaacaggctgttgatactgttttagctaaaaagcgggttgatagcctacaattaactagagaacaaatgttaacaaacagatttaatgatcttttggataggatggatataatgtttggttctacaggctctgctgacatagaagaatggatggctggagttgcttggctacactgtttgttgcccaaaatggattcagtggtgtatgactttttaaaatgcatggtgtacaacattcctaaaaaaagatactggctgtttaaaggaccaattgatagtggtaaaactacattagcagctgctttgcttgaattatgtggggggaaagctttaaatgttaatttgcccttggacaggctgaactttgagctaggagtagctattgaccagtttttagtagtttttgaggatgtaaagggcactggaggggagtccagagatttgccttcaggtcagggaattaataacctggacaatttaagggattatttggatggcagtgttaaggtaaacttagaaaagaaacacctaaataaaagaactcaaatatttccccctggaatagtcaccatgaatgagtacagtgtgcctaaaacactgcaggccagatttgtaaaacaaatagattttaggcccaaagattatttaaagcattgcctggaacgcagtgagtttttgttagaaaagagaataattcaaagtggcattgctttgcttcttatgttaatttggtacagacctgtggctgagtttgctcaaagtattcagagcagaattgtggagtggaaagagagattggacaaagagtttagtttgtcagtgtatcaaaaaatgaagtttaatgtggctatgggaattggagttttagattggctaagaaacagtgatgatgatgatgaagacagccaggaaaatgctgataaaaatgaagatggtggggagaagaacatggaagactcagggcatgaaacaggcattgattcacagtcccaaggctcatttcaggcccctcagtcctcacagtctgttcatgatcataatcagccataccacatttgtagaggttttacttgctttaaaaaacctcccacacctccccctgaacctgaaacatga

SEQ ID NO: 562 - DNA, 2127 bp, Artificial Sequence
  SV40 T Antigen (CpG-free)
atggataaagttttaaacagagaggaatctttgcagctaatggaccttctaggtcttgaaaggagtgcctgggggaatattcctctgatgagaaaggcatatttaaaaaaatgcaaggagtttcatcctgataaaggaggagatgaagaaaaaatgaagaaaatgaatactctgtacaagaaaatggaagatggagtaaaatatgctcatcaacctgactttggaggcttctgggatgcaactgagataccaacctatggaactgatgaatgggagcagtggtggaatgcctttaatgaggaaaacctgttttgctcagaagaaatgccatctagtgatgatgaggctactgctgactctcaacattctactcctccaaaaaagaagagaaaggtagaagaccccaaggactttccttcagaattgctaagttttttgagtcatgctgtgtttagtaatagaactcttgcttgctttgctatttacaccacaaaggaaaaagctgcactgctatacaagaaaattatggaaaaatattctgtaacctttataagtaggcataacagttataatcataacatactgttttttcttactccacacaggcatagagtgtctgctattaataactatgctcaaaaattgtgtacctttagctttttaatttgtaaaggggttaataaggaatatttgatgtatagtgccttgactagagatccattttctgttattgaggaaagtttgccaggtgggttaaaggagcatgattttaatccagaagaagcagaggaaactaaacaagtgtcctggaagcttgtaacagagtatgcaatggaaacaaaatgtgatgatgtgttgttattgcttgggatgtacttggaatttcagtacagttttgaaatgtgtttaaaatgtattaaaaaagaacagcccagccactataagtaccatgaaaagcattatgcaaatgctgctatatttgctgacagcaaaaaccaaaaaaccatatgccaacaggctgttgatactgttttagctaaaaagagagttgatagcctacaattaactagagaacaaatgttaacaaacagatttaatgatcttttggataggatggatataatgtttggttctacaggctctgctgacatagaagaatggatggctggagttgcttggctacactgtttgttgcccaaaatggattcagtggtgtatgactttttaaaatgcatggtgtacaacattcctaaaaaaagatactggctgtttaaaggaccaattgatagtggtaaaactacattagcagctgctttgcttgaattatgtggggggaaagctttaaatgttaatttgcccttggacaggctgaactttgagctaggagtagctattgaccagtttttagtagtttttgaggatgtaaagggcactggaggggagtccagagatttgccttcaggtcagggaattaataacctggacaatttaagggattatttggatggcagtgttaaggtaaacttagaaaagaaacacctaaataaaagaactcaaatatttccccctggaatagtcaccatgaatgagtacagtgtgcctaaaacactgcaggccagatttgtaaaacaaatagattttaggcccaaagattatttaaagcattgcctggaaaggagtgagtttttgttagaaaagagaataattcaaagtggcattgctttgcttcttatgttaatttggtacagacctgtggctgagtttgctcaaagtattcagagcagaattgtggagtggaaagagagattggacaaagagtttagtttgtcagtgtatcaaaaaatgaagtttaatgtggctatgggaattggagttttagattggctaagaaacagtgatgatgatgatgaagacagccaggaaaatgctgataaaaatgaagatggtggggagaagaacatggaagactcagggcatgaaacaggcattgattcacagtcccaaggctcatttcaggcccctcagtcctcacagtctgttcatgatcataatcagccataccacatttgtagaggttttacttgctttaaaaaacctcccacacctccccctgaacctgaaacatga

SEQ ID NO: 563 - DNA, 2127 bp, Artificial Sequence
  SV40 T Antigen (human optimized, CpG-free)
atggacaaagtgctgaatagggaggaaagtctgcaactgatggatctgttgggacttgagaggtctgcatggggtaatatcccacttatgaggaaagcatacctgaagaagtgtaaagagttccatcctgacaaaggtggagatgaagagaagatgaaaaagatgaacacactgtataagaaaatggaagatggtgtaaagtatgctcaccagccagattttggaggtttttgggatgccacagagatacctacttatggtacagatgagtgggaacagtggtggaatgcatttaatgaagagaatttgttttgctctgaggaaatgcctagttctgatgatgaggccacagctgactcccagcacagtactccacccaagaaaaagagaaaagtggaagacccaaaggatttcccctctgaactcttgtccttcttgtctcatgcagtgttctcaaataggaccctggcttgctttgctatctacactactaaggagaaggcagctctcttgtacaagaaaatcatggaaaagtattctgtcacctttatttccaggcacaactcctataatcataatattctctttttcttgacaccccataggcatagggtgagtgcaattaacaactatgctcagaagttgtgtactttctccttcctgatctgtaagggtgtgaataaggagtatctcatgtattcagccctgaccagagacccctttagtgtgattgaagaatccctgcctggtgggctcaaggagcatgatttcaacccagaagaggctgaagaaacaaaacaggtgagctggaagcttgtgactgaatatgcaatggagacaaagtgtgatgatgtcctgctcctcctgggaatgtacctggaatttcagtatagctttgaaatgtgtctgaaatgtatcaaaaaggaacagccttctcattataagtatcatgaaaagcactatgccaatgcagctatatttgcagattctaaaaaccagaaaaccatttgtcagcaagctgttgacacagttctggccaagaaaagagtagactctctccagcttaccagggagcagatgttgacaaataggttcaatgaccttctggacagaatggacataatgtttggctcaactggatctgcagatatagaggagtggatggctggagtggcctggctgcactgtctcctccctaaaatggacagtgtagtctatgacttccttaagtgtatggtctataatatccctaaaaagagatactggttgttcaagggacccattgattcagggaaaactacccttgctgctgcacttctggaactctgtggtgggaaagctctcaatgtcaacctgccacttgatagactcaactttgagctgggggtggcaattgatcagtttttggtagtgtttgaagatgtgaaaggtacaggaggagagtccagggatttgcctagtggccaaggcatcaacaatctggacaacctcagagactacctggatgggtctgtaaaggtcaaccttgaaaaaaagcatctcaacaagaggactcaaatatttccacctggaatagtcactatgaatgaatattcagtgcccaagaccctccaggctagatttgtcaagcaaattgatttcagacctaaagattatctgaaacattgtttggagaggagtgagttcctccttgagaaaaggattattcagtcaggaatagcactgcttcttatgctgatatggtatagaccagtggctgagtttgcccaaagcattcagagtagaatagttgagtggaaagaaaggcttgacaaggagttttctctttcagtatatcaaaagatgaagttcaatgtggctatgggtattggagtgcttgattggttgagaaacagtgatgatgatgatgaagattctcaggaaaatgctgataaaaatgaggatgggggagagaagaatatggaagattctggtcatgaaactggcattgatagtcagagccaggggagtttccaggctccacagagctcccaaagtgtccatgaccacaaccagccttaccatatatgcagaggttttacttgtttcaagaaacctcccactccccctccagaacctgaaacatga

SEQ ID NO: 564 - protein, 708 aa, Simian virus 40
  SV40 T Antigen Protein
  ref <308>: DATABASE ACCESSION NUMBER: GenBank: AAB59924.1
  ref <309>: DATABASE ENTRY DATE: 2000-12-14
MDKVLNREESLQLMDLLGLERSAWGNIPLMRKAYLKKCKEFHPDKGGDEEKMKKMNTLYKKMEDGVKYAHQPDFGGFWDATEIPTYGTDEWEQWWNAFNEENLFCSEEMPSSDDEATADSQHSTPPKKKRKVEDPKDFPSELLSFLSHAVFSNRTLACFAIYTTKEKAALLYKKIMEKYSVTFISRHNSYNHNILFFLTPHRHRVSAINNYAQKLCTFSFLICKGVNKEYLMYSALTRDPFSVIEESLPGGLKEHDFNPEEAEETKQVSWKLVTEYAMETKCDDVLLLLGMYLEFQYSFEMCLKCIKKEQPSHYKYHEKHYANAAIFADSKNQKTICQQAVDTVLAKKRVDSLQLTREQMLTNRFNDLLDRMDIMFGSTGSADIEEWMAGVAWLHCLLPKMDSVVYDFLKCMVYNIPKKRYWLFKGPIDSGKTTLAAALLELCGGKALNVNLPLDRLNFELGVAIDQFLVVFEDVKGTGGESRDLPSGQGINNLDNLRDYLDGSVKVNLEKKHLNKRTQIFPPGIVTMNEYSVPKTLQARFVKQIDFRPKDYLKHCLERSEFLLEKRIIQSGIALLLMLIWYRPVAEFAQSIQSRIVEWKERLDKEFSLSVYQKMKFNVAMGIGVLDWLRNSDDDDEDSQENADKNEDGGEKNMEDSGHETGIDSQSQGSFQAPQSSQSVHDHNQPYHICRGFTCFKKPPTPPPEPET

SEQ ID NO: 565 - protein, 708 aa, Artificial Sequence
  SV40 T Antigen mutant L19F
MDKVLNREESLQLMDLLGFERSAWGNIPLMRKAYLKKCKEFHPDKGGDEEKMKKMNTLYKKMEDGVKYAHQPDFGGFWDATEIPTYGTDEWEQWWNAFNEENLFCSEEMPSSDDEATADSQHSTPPKKKRKVEDPKDFPSELLSFLSHAVFSNRTLACFAIYTTKEKAALLYKKIMEKYSVTFISRHNSYNHNILFFLTPHRHRVSAINNYAQKLCTFSFLICKGVNKEYLMYSALTRDPFSVIEESLPGGLKEHDFNPEEAEETKQVSWKLVTEYAMETKCDDVLLLLGMYLEFQYSFEMCLKCIKKEQPSHYKYHEKHYANAAIFADSKNQKTICQQAVDTVLAKKRVDSLQLTREQMLTNRFNDLLDRMDIMFGSTGSADIEEWMAGVAWLHCLLPKMDSVVYDFLKCMVYNIPKKRYWLFKGPIDSGKTTLAAALLELCGGKALNVNLPLDRLNFELGVAIDQFLVVFEDVKGTGGESRDLPSGQGINNLDNLRDYLDGSVKVNLEKKHLNKRTQIFPPGIVTMNEYSVPKTLQARFVKQIDFRPKDYLKHCLERSEFLLEKRIIQSGIALLLMLIWYRPVAEFAQSIQSRIVEWKERLDKEFSLSVYQKMKFNVAMGIGVLDWLRNSDDDDEDSQENADKNEDGGEKNMEDSGHETGIDSQSQGSFQAPQSSQSVHDHNQPYHICRGFTCFKKPPTPPPEPET

SEQ ID NO: 566 - protein, 708 aa, Artificial Sequence
  SV40 T Antigen mutant E107L
MDKVLNREESLQLMDLLGLERSAWGNIPLMRKAYLKKCKEFHPDKGGDEEKMKKMNTLYKKMEDGVKYAHQPDFGGFWDATEIPTYGTDEWEQWWNAFNEENLFCSLEMPSSDDEATADSQHSTPPKKKRKVEDPKDFPSELLSFLSHAVFSNRTLACFAIYTTKEKAALLYKKIMEKYSVTFISRHNSYNHNILFFLTPHRHRVSAINNYAQKLCTFSFLICKGVNKEYLMYSALTRDPFSVIEESLPGGLKEHDFNPEEAEETKQVSWKLVTEYAMETKCDDVLLLLGMYLEFQYSFEMCLKCIKKEQPSHYKYHEKHYANAAIFADSKNQKTICQQAVDTVLAKKRVDSLQLTREQMLTNRFNDLLDRMDIMFGSTGSADIEEWMAGVAWLHCLLPKMDSVVYDFLKCMVYNIPKKRYWLFKGPIDSGKTTLAAALLELCGGKALNVNLPLDRLNFELGVAIDQFLVVFEDVKGTGGESRDLPSGQGINNLDNLRDYLDGSVKVNLEKKHLNKRTQIFPPGIVTMNEYSVPKTLQARFVKQIDFRPKDYLKHCLERSEFLLEKRIIQSGIALLLMLIWYRPVAEFAQSIQSRIVEWKERLDKEFSLSVYQKMKFNVAMGIGVLDWLRNSDDDDEDSQENADKNEDGGEKNMEDSGHETGIDSQSQGSFQAPQSSQSVHDHNQPYHICRGFTCFKKPPTPPPEPET

SEQ ID NO: 567 - protein, 708 aa, Artificial Sequence
  SV40 T Antigen mutant E107K
MDKVLNREESLQLMDLLGLERSAWGNIPLMRKAYLKKCKEFHPDKGGDEEKMKKMNTLYKKMEDGVKYAHQPDFGGFWDATEIPTYGTDEWEQWWNAFNEENLFCSKEMPSSDDEATADSQHSTPPKKKRKVEDPKDFPSELLSFLSHAVFSNRTLACFAIYTTKEKAALLYKKIMEKYSVTFISRHNSYNHNILFFLTPHRHRVSAINNYAQKLCTFSFLICKGVNKEYLMYSALTRDPFSVIEESLPGGLKEHDFNPEEAEETKQVSWKLVTEYAMETKCDDVLLLLGMYLEFQYSFEMCLKCIKKEQPSHYKYHEKHYANAAIFADSKNQKTICQQAVDTVLAKKRVDSLQLTREQMLTNRFNDLLDRMDIMFGSTGSADIEEWMAGVAWLHCLLPKMDSVVYDFLKCMVYNIPKKRYWLFKGPIDSGKTTLAAALLELCGGKALNVNLPLDRLNFELGVAIDQFLVVFEDVKGTGGESRDLPSGQGINNLDNLRDYLDGSVKVNLEKKHLNKRTQIFPPGIVTMNEYSVPKTLQARFVKQIDFRPKDYLKHCLERSEFLLEKRIIQSGIALLLMLIWYRPVAEFAQSIQSRIVEWKERLDKEFSLSVYQKMKFNVAMGIGVLDWLRNSDDDDEDSQENADKNEDGGEKNMEDSGHETGIDSQSQGSFQAPQSSQSVHDHNQPYHICRGFTCFKKPPTPPPEPET

SEQ ID NO: 568 - protein, 708 aa, Artificial Sequence
  SV40 T Antigen mutant E108L
MDKVLNREESLQLMDLLGLERSAWGNIPLMRKAYLKKCKEFHPDKGGDEEKMKKMNTLYKKMEDGVKYAHQPDFGGFWDATEIPTYGTDEWEQWWNAFNEENLFCSELMPSSDDEATADSQHSTPPKKKRKVEDPKDFPSELLSFLSHAVFSNRTLACFAIYTTKEKAALLYKKIMEKYSVTFISRHNSYNHNILFFLTPHRHRVSAINNYAQKLCTFSFLICKGVNKEYLMYSALTRDPFSVIEESLPGGLKEHDFNPEEAEETKQVSWKLVTEYAMETKCDDVLLLLGMYLEFQYSFEMCLKCIKKEQPSHYKYHEKHYANAAIFADSKNQKTICQQAVDTVLAKKRVDSLQLTREQMLTNRFNDLLDRMDIMFGSTGSADIEEWMAGVAWLHCLLPKMDSVVYDFLKCMVYNIPKKRYWLFKGPIDSGKTTLAAALLELCGGKALNVNLPLDRLNFELGVAIDQFLVVFEDVKGTGGESRDLPSGQGINNLDNLRDYLDGSVKVNLEKKHLNKRTQIFPPGIVTMNEYSVPKTLQARFVKQIDFRPKDYLKHCLERSEFLLEKRIIQSGIALLLMLIWYRPVAEFAQSIQSRIVEWKERLDKEFSLSVYQKMKFNVAMGIGVLDWLRNSDDDDEDSQENADKNEDGGEKNMEDSGHETGIDSQSQGSFQAPQSSQSVHDHNQPYHICRGFTCFKKPPTPPPEPET

SEQ ID NO: 569 - protein, 708 aa, Artificial Sequence
  SV40 T Antigen mutant D402R
MDKVLNREESLQLMDLLGLERSAWGNIPLMRKAYLKKCKEFHPDKGGDEEKMKKMNTLYKKMEDGVKYAHQPDFGGFWDATEIPTYGTDEWEQWWNAFNEENLFCSEEMPSSDDEATADSQHSTPPKKKRKVEDPKDFPSELLSFLSHAVFSNRTLACFAIYTTKEKAALLYKKIMEKYSVTFISRHNSYNHNILFFLTPHRHRVSAINNYAQKLCTFSFLICKGVNKEYLMYSALTRDPFSVIEESLPGGLKEHDFNPEEAEETKQVSWKLVTEYAMETKCDDVLLLLGMYLEFQYSFEMCLKCIKKEQPSHYKYHEKHYANAAIFADSKNQKTICQQAVDTVLAKKRVDSLQLTREQMLTNRFNDLLDRMDIMFGSTGSADIEEWMAGVAWLHCLLPKMRSVVYDFLKCMVYNIPKKRYWLFKGPIDSGKTTLAAALLELCGGKALNVNLPLDRLNFELGVAIDQFLVVFEDVKGTGGESRDLPSGQGINNLDNLRDYLDGSVKVNLEKKHLNKRTQIFPPGIVTMNEYSVPKTLQARFVKQIDFRPKDYLKHCLERSEFLLEKRIIQSGIALLLMLIWYRPVAEFAQSIQSRIVEWKERLDKEFSLSVYQKMKFNVAMGIGVLDWLRNSDDDDEDSQENADKNEDGGEKNMEDSGHETGIDSQSQGSFQAPQSSQSVHDHNQPYHICRGFTCFKKPPTPPPEPET

SEQ ID NO: 570 - protein, 708 aa, Artificial Sequence
  SV40 T Antigen mutant D402E
MDKVLNREESLQLMDLLGLERSAWGNIPLMRKAYLKKCKEFHPDKGGDEEKMKKMNTLYKKMEDGVKYAHQPDFGGFWDATEIPTYGTDEWEQWWNAFNEENLFCSEEMPSSDDEATADSQHSTPPKKKRKVEDPKDFPSELLSFLSHAVFSNRTLACFAIYTTKEKAALLYKKIMEKYSVTFISRHNSYNHNILFFLTPHRHRVSAINNYAQKLCTFSFLICKGVNKEYLMYSALTRDPFSVIEESLPGGLKEHDFNPEEAEETKQVSWKLVTEYAMETKCDDVLLLLGMYLEFQYSFEMCLKCIKKEQPSHYKYHEKHYANAAIFADSKNQKTICQQAVDTVLAKKRVDSLQLTREQMLTNRFNDLLDRMDIMFGSTGSADIEEWMAGVAWLHCLLPKMESVVYDFLKCMVYNIPKKRYWLFKGPIDSGKTTLAAALLELCGGKALNVNLPLDRLNFELGVAIDQFLVVFEDVKGTGGESRDLPSGQGINNLDNLRDYLDGSVKVNLEKKHLNKRTQIFPPGIVTMNEYSVPKTLQARFVKQIDFRPKDYLKHCLERSEFLLEKRIIQSGIALLLMLIWYRPVAEFAQSIQSRIVEWKERLDKEFSLSVYQKMKFNVAMGIGVLDWLRNSDDDDEDSQENADKNEDGGEKNMEDSGHETGIDSQSQGSFQAPQSSQSVHDHNQPYHICRGFTCFKKPPTPPPEPET

SEQ ID NO: 571 - protein, 708 aa, Artificial Sequence
  SV40 T Antigen mutant P453S
MDKVLNREESLQLMDLLGLERSAWGNIPLMRKAYLKKCKEFHPDKGGDEEKMKKMNTLYKKMEDGVKYAHQPDFGGFWDATEIPTYGTDEWEQWWNAFNEENLFCSEEMPSSDDEATADSQHSTPPKKKRKVEDPKDFPSELLSFLSHAVFSNRTLACFAIYTTKEKAALLYKKIMEKYSVTFISRHNSYNHNILFFLTPHRHRVSAINNYAQKLCTFSFLICKGVNKEYLMYSALTRDPFSVIEESLPGGLKEHDFNPEEAEETKQVSWKLVTEYAMETKCDDVLLLLGMYLEFQYSFEMCLKCIKKEQPSHYKYHEKHYANAAIFADSKNQKTICQQAVDTVLAKKRVDSLQLTREQMLTNRFNDLLDRMDIMFGSTGSADIEEWMAGVAWLHCLLPKMDSVVYDFLKCMVYNIPKKRYWLFKGPIDSGKTTLAAALLELCGGKALNVNLSLDRLNFELGVAIDQFLVVFEDVKGTGGESRDLPSGQGINNLDNLRDYLDGSVKVNLEKKHLNKRTQIFPPGIVTMNEYSVPKTLQARFVKQIDFRPKDYLKHCLERSEFLLEKRIIQSGIALLLMLIWYRPVAEFAQSIQSRIVEWKERLDKEFSLSVYQKMKFNVAMGIGVLDWLRNSDDDDEDSQENADKNEDGGEKNMEDSGHETGIDSQSQGSFQAPQSSQSVHDHNQPYHICRGFTCFKKPPTPPPEPET

SEQ ID NO: 572 - protein, 708 aa, Artificial Sequence
  SV40 T Antigen mutant V585R
MDKVLNREESLQLMDLLGLERSAWGNIPLMRKAYLKKCKEFHPDKGGDEEKMKKMNTLYKKMEDGVKYAHQPDFGGFWDATEIPTYGTDEWEQWWNAFNEENLFCSEEMPSSDDEATADSQHSTPPKKKRKVEDPKDFPSELLSFLSHAVFSNRTLACFAIYTTKEKAALLYKKIMEKYSVTFISRHNSYNHNILFFLTPHRHRVSAINNYAQKLCTFSFLICKGVNKEYLMYSALTRDPFSVIEESLPGGLKEHDFNPEEAEETKQVSWKLVTEYAMETKCDDVLLLLGMYLEFQYSFEMCLKCIKKEQPSHYKYHEKHYANAAIFADSKNQKTICQQAVDTVLAKKRVDSLQLTREQMLTNRFNDLLDRMDIMFGSTGSADIEEWMAGVAWLHCLLPKMDSVVYDFLKCMVYNIPKKRYWLFKGPIDSGKTTLAAALLELCGGKALNVNLPLDRLNFELGVAIDQFLVVFEDVKGTGGESRDLPSGQGINNLDNLRDYLDGSVKVNLEKKHLNKRTQIFPPGIVTMNEYSVPKTLQARFVKQIDFRPKDYLKHCLERSEFLLEKRIIQSGIALLLMLIWYRPRAEFAQSIQSRIVEWKERLDKEFSLSVYQKMKFNVAMGIGVLDWLRNSDDDDEDSQENADKNEDGGEKNMEDSGHETGIDSQSQGSFQAPQSSQSVHDHNQPYHICRGFTCFKKPPTPPPEPET

SEQ ID NO: 573 - protein, 708 aa, Artificial Sequence
  SV40 T Antigen mutant D604R
MDKVLNREESLQLMDLLGLERSAWGNIPLMRKAYLKKCKEFHPDKGGDEEKMKKMNTLYKKMEDGVKYAHQPDFGGFWDATEIPTYGTDEWEQWWNAFNEENLFCSEEMPSSDDEATADSQHSTPPKKKRKVEDPKDFPSELLSFLSHAVFSNRTLACFAIYTTKEKAALLYKKIMEKYSVTFISRHNSYNHNILFFLTPHRHRVSAINNYAQKLCTFSFLICKGVNKEYLMYSALTRDPFSVIEESLPGGLKEHDFNPEEAEETKQVSWKLVTEYAMETKCDDVLLLLGMYLEFQYSFEMCLKCIKKEQPSHYKYHEKHYANAAIFADSKNQKTICQQAVDTVLAKKRVDSLQLTREQMLTNRFNDLLDRMDIMFGSTGSADIEEWMAGVAWLHCLLPKMDSVVYDFLKCMVYNIPKKRYWLFKGPIDSGKTTLAAALLELCGGKALNVNLPLDRLNFELGVAIDQFLVVFEDVKGTGGESRDLPSGQGINNLDNLRDYLDGSVKVNLEKKHLNKRTQIFPPGIVTMNEYSVPKTLQARFVKQIDFRPKDYLKHCLERSEFLLEKRIIQSGIALLLMLIWYRPVAEFAQSIQSRIVEWKERLRKEFSLSVYQKMKFNVAMGIGVLDWLRNSDDDDEDSQENADKNEDGGEKNMEDSGHETGIDSQSQGSFQAPQSSQSVHDHNQPYHICRGFTCFKKPPTPPPEPET

SEQ ID NO: 574 - protein, 708 aa, Artificial Sequence
  SV40 T Antigen mutant P28S
MDKVLNREESLQLMDLLGLERSAWGNISLMRKAYLKKCKEFHPDKGGDEEKMKKMNTLYKKMEDGVKYAHQPDFGGFWDATEIPTYGTDEWEQWWNAFNEENLFCSEEMPSSDDEATADSQHSTPPKKKRKVEDPKDFPSELLSFLSHAVFSNRTLACFAIYTTKEKAALLYKKIMEKYSVTFISRHNSYNHNILFFLTPHRHRVSAINNYAQKLCTFSFLICKGVNKEYLMYSALTRDPFSVIEESLPGGLKEHDFNPEEAEETKQVSWKLVTEYAMETKCDDVLLLLGMYLEFQYSFEMCLKCIKKEQPSHYKYHEKHYANAAIFADSKNQKTICQQAVDTVLAKKRVDSLQLTREQMLTNRFNDLLDRMDIMFGSTGSADIEEWMAGVAWLHCLLPKMDSVVYDFLKCMVYNIPKKRYWLFKGPIDSGKTTLAAALLELCGGKALNVNLPLDRLNFELGVAIDQFLVVFEDVKGTGGESRDLPSGQGINNLDNLRDYLDGSVKVNLEKKHLNKRTQIFPPGIVTMNEYSVPKTLQARFVKQIDFRPKDYLKHCLERSEFLLEKRIIQSGIALLLMLIWYRPVAEFAQSIQSRIVEWKERLDKEFSLSVYQKMKFNVAMGIGVLDWLRNSDDDDEDSQENADKNEDGGEKNMEDSGHETGIDSQSQGSFQAPQSSQSVHDHNQPYHICRGFTCFKKPPTPPPEPET

SEQ ID NO: 575 - protein, 708 aa, Artificial Sequence
  SV40 T Antigen mutant L103P
MDKVLNREESLQLMDLLGLERSAWGNIPLMRKAYLKKCKEFHPDKGGDEEKMKKMNTLYKKMEDGVKYAHQPDFGGFWDATEIPTYGTDEWEQWWNAFNEENPFCSEEMPSSDDEATADSQHSTPPKKKRKVEDPKDFPSELLSFLSHAVFSNRTLACFAIYTTKEKAALLYKKIMEKYSVTFISRHNSYNHNILFFLTPHRHRVSAINNYAQKLCTFSFLICKGVNKEYLMYSALTRDPFSVIEESLPGGLKEHDFNPEEAEETKQVSWKLVTEYAMETKCDDVLLLLGMYLEFQYSFEMCLKCIKKEQPSHYKYHEKHYANAAIFADSKNQKTICQQAVDTVLAKKRVDSLQLTREQMLTNRFNDLLDRMDIMFGSTGSADIEEWMAGVAWLHCLLPKMDSVVYDFLKCMVYNIPKKRYWLFKGPIDSGKTTLAAALLELCGGKALNVNLPLDRLNFELGVAIDQFLVVFEDVKGTGGESRDLPSGQGINNLDNLRDYLDGSVKVNLEKKHLNKRTQIFPPGIVTMNEYSVPKTLQARFVKQIDFRPKDYLKHCLERSEFLLEKRIIQSGIALLLMLIWYRPVAEFAQSIQSRIVEWKERLDKEFSLSVYQKMKFNVAMGIGVLDWLRNSDDDDEDSQENADKNEDGGEKNMEDSGHETGIDSQSQGSFQAPQSSQSVHDHNQPYHICRGFTCFKKPPTPPPEPET

SEQ ID NO: 576 - protein, 708 aa, Artificial Sequence
  SV40 T Antigen mutant C105A
MDKVLNREESLQLMDLLGLERSAWGNIPLMRKAYLKKCKEFHPDKGGDEEKMKKMNTLYKKMEDGVKYAHQPDFGGFWDATEIPTYGTDEWEQWWNAFNEENLFASEEMPSSDDEATADSQHSTPPKKKRKVEDPKDFPSELLSFLSHAVFSNRTLACFAIYTTKEKAALLYKKIMEKYSVTFISRHNSYNHNILFFLTPHRHRVSAINNYAQKLCTFSFLICKGVNKEYLMYSALTRDPFSVIEESLPGGLKEHDFNPEEAEETKQVSWKLVTEYAMETKCDDVLLLLGMYLEFQYSFEMCLKCIKKEQPSHYKYHEKHYANAAIFADSKNQKTICQQAVDTVLAKKRVDSLQLTREQMLTNRFNDLLDRMDIMFGSTGSADIEEWMAGVAWLHCLLPKMDSVVYDFLKCMVYNIPKKRYWLFKGPIDSGKTTLAAALLELCGGKALNVNLPLDRLNFELGVAIDQFLVVFEDVKGTGGESRDLPSGQGINNLDNLRDYLDGSVKVNLEKKHLNKRTQIFPPGIVTMNEYSVPKTLQARFVKQIDFRPKDYLKHCLERSEFLLEKRIIQSGIALLLMLIWYRPVAEFAQSIQSRIVEWKERLDKEFSLSVYQKMKFNVAMGIGVLDWLRNSDDDDEDSQENADKNEDGGEKNMEDSGHETGIDSQSQGSFQAPQSSQSVHDHNQPYHICRGFTCFKKPPTPPPEPET

SEQ ID NO: 577 - protein, 708 aa, Artificial Sequence
  SV40 T Antigen mutant S112N
MDKVLNREESLQLMDLLGLERSAWGNIPLMRKAYLKKCKEFHPDKGGDEEKMKKMNTLYKKMEDGVKYAHQPDFGGFWDATEIPTYGTDEWEQWWNAFNEENLFCSEEMPSNDDEATADSQHSTPPKKKRKVEDPKDFPSELLSFLSHAVFSNRTLACFAIYTTKEKAALLYKKIMEKYSVTFISRHNSYNHNILFFLTPHRHRVSAINNYAQKLCTFSFLICKGVNKEYLMYSALTRDPFSVIEESLPGGLKEHDFNPEEAEETKQVSWKLVTEYAMETKCDDVLLLLGMYLEFQYSFEMCLKCIKKEQPSHYKYHEKHYANAAIFADSKNQKTICQQAVDTVLAKKRVDSLQLTREQMLTNRFNDLLDRMDIMFGSTGSADIEEWMAGVAWLHCLLPKMDSVVYDFLKCMVYNIPKKRYWLFKGPIDSGKTTLAAALLELCGGKALNVNLPLDRLNFELGVAIDQFLVVFEDVKGTGGESRDLPSGQGINNLDNLRDYLDGSVKVNLEKKHLNKRTQIFPPGIVTMNEYSVPKTLQARFVKQIDFRPKDYLKHCLERSEFLLEKRIIQSGIALLLMLIWYRPVAEFAQSIQSRIVEWKERLDKEFSLSVYQKMKFNVAMGIGVLDWLRNSDDDDEDSQENADKNEDGGEKNMEDSGHETGIDSQSQGSFQAPQSSQSVHDHNQPYHICRGFTCFKKPPTPPPEPET

SEQ ID NO: 578 - protein, 708 aa, Artificial Sequence
  SV40 T Antigen mutant S189N
MDKVLNREESLQLMDLLGLERSAWGNIPLMRKAYLKKCKEFHPDKGGDEEKMKKMNTLYKKMEDGVKYAHQPDFGGFWDATEIPTYGTDEWEQWWNAFNEENLFCSEEMPSSDDEATADSQHSTPPKKKRKVEDPKDFPSELLSFLSHAVFSNRTLACFAIYTTKEKAALLYKKIMEKYSVTFISRHNNYNHNILFFLTPHRHRVSAINNYAQKLCTFSFLICKGVNKEYLMYSALTRDPFSVIEESLPGGLKEHDFNPEEAEETKQVSWKLVTEYAMETKCDDVLLLLGMYLEFQYSFEMCLKCIKKEQPSHYKYHEKHYANAAIFADSKNQKTICQQAVDTVLAKKRVDSLQLTREQMLTNRFNDLLDRMDIMFGSTGSADIEEWMAGVAWLHCLLPKMDSVVYDFLKCMVYNIPKKRYWLFKGPIDSGKTTLAAALLELCGGKALNVNLPLDRLNFELGVAIDQFLVVFEDVKGTGGESRDLPSGQGINNLDNLRDYLDGSVKVNLEKKHLNKRTQIFPPGIVTMNEYSVPKTLQARFVKQIDFRPKDYLKHCLERSEFLLEKRIIQSGIALLLMLIWYRPVAEFAQSIQSRIVEWKERLDKEFSLSVYQKMKFNVAMGIGVLDWLRNSDDDDEDSQENADKNEDGGEKNMEDSGHETGIDSQSQGSFQAPQSSQSVHDHNQPYHICRGFTCFKKPPTPPPEPET

SEQ ID NO: 579 - protein, 708 aa, Artificial Sequence
  SV40 T Antigen mutant E107L/E108L
MDKVLNREESLQLMDLLGLERSAWGNIPLMRKAYLKKCKEFHPDKGGDEEKMKKMNTLYKKMEDGVKYAHQPDFGGFWDATEIPTYGTDEWEQWWNAFNEENLFCSLLMPSSDDEATADSQHSTPPKKKRKVEDPKDFPSELLSFLSHAVFSNRTLACFAIYTTKEKAALLYKKIMEKYSVTFISRHNSYNHNILFFLTPHRHRVSAINNYAQKLCTFSFLICKGVNKEYLMYSALTRDPFSVIEESLPGGLKEHDFNPEEAEETKQVSWKLVTEYAMETKCDDVLLLLGMYLEFQYSFEMCLKCIKKEQPSHYKYHEKHYANAAIFADSKNQKTICQQAVDTVLAKKRVDSLQLTREQMLTNRFNDLLDRMDIMFGSTGSADIEEWMAGVAWLHCLLPKMDSVVYDFLKCMVYNIPKKRYWLFKGPIDSGKTTLAAALLELCGGKALNVNLPLDRLNFELGVAIDQFLVVFEDVKGTGGESRDLPSGQGINNLDNLRDYLDGSVKVNLEKKHLNKRTQIFPPGIVTMNEYSVPKTLQARFVKQIDFRPKDYLKHCLERSEFLLEKRIIQSGIALLLMLIWYRPVAEFAQSIQSRIVEWKERLDKEFSLSVYQKMKFNVAMGIGVLDWLRNSDDDDEDSQENADKNEDGGEKNMEDSGHETGIDSQSQGSFQAPQSSQSVHDHNQPYHICRGFTCFKKPPTPPPEPET

SEQ ID NO: 580 - protein, 708 aa, Artificial Sequence
  SV40 T Antigen mutant L103P/C105A
MDKVLNREESLQLMDLLGLERSAWGNIPLMRKAYLKKCKEFHPDKGGDEEKMKKMNTLYKKMEDGVKYAHQPDFGGFWDATEIPTYGTDEWEQWWNAFNEENPFASEEMPSSDDEATADSQHSTPPKKKRKVEDPKDFPSELLSFLSHAVFSNRTLACFAIYTTKEKAALLYKKIMEKYSVTFISRHNSYNHNILFFLTPHRHRVSAINNYAQKLCTFSFLICKGVNKEYLMYSALTRDPFSVIEESLPGGLKEHDFNPEEAEETKQVSWKLVTEYAMETKCDDVLLLLGMYLEFQYSFEMCLKCIKKEQPSHYKYHEKHYANAAIFADSKNQKTICQQAVDTVLAKKRVDSLQLTREQMLTNRFNDLLDRMDIMFGSTGSADIEEWMAGVAWLHCLLPKMDSVVYDFLKCMVYNIPKKRYWLFKGPIDSGKTTLAAALLELCGGKALNVNLPLDRLNFELGVAIDQFLVVFEDVKGTGGESRDLPSGQGINNLDNLRDYLDGSVKVNLEKKHLNKRTQIFPPGIVTMNEYSVPKTLQARFVKQIDFRPKDYLKHCLERSEFLLEKRIIQSGIALLLMLIWYRPVAEFAQSIQSRIVEWKERLDKEFSLSVYQKMKFNVAMGIGVLDWLRNSDDDDEDSQENADKNEDGGEKNMEDSGHETGIDSQSQGSFQAPQSSQSVHDHNQPYHICRGFTCFKKPPTPPPEPET

SEQ ID NO: 581 - protein, 708 aa, Artificial Sequence
  SV40 T Antigen mutant L103P/E107K
MDKVLNREESLQLMDLLGLERSAWGNIPLMRKAYLKKCKEFHPDKGGDEEKMKKMNTLYKKMEDGVKYAHQPDFGGFWDATEIPTYGTDEWEQWWNAFNEENPFCSKEMPSSDDEATADSQHSTPPKKKRKVEDPKDFPSELLSFLSHAVFSNRTLACFAIYTTKEKAALLYKKIMEKYSVTFISRHNSYNHNILFFLTPHRHRVSAINNYAQKLCTFSFLICKGVNKEYLMYSALTRDPFSVIEESLPGGLKEHDFNPEEAEETKQVSWKLVTEYAMETKCDDVLLLLGMYLEFQYSFEMCLKCIKKEQPSHYKYHEKHYANAAIFADSKNQKTICQQAVDTVLAKKRVDSLQLTREQMLTNRFNDLLDRMDIMFGSTGSADIEEWMAGVAWLHCLLPKMDSVVYDFLKCMVYNIPKKRYWLFKGPIDSGKTTLAAALLELCGGKALNVNLPLDRLNFELGVAIDQFLVVFEDVKGTGGESRDLPSGQGINNLDNLRDYLDGSVKVNLEKKHLNKRTQIFPPGIVTMNEYSVPKTLQARFVKQIDFRPKDYLKHCLERSEFLLEKRIIQSGIALLLMLIWYRPVAEFAQSIQSRIVEWKERLDKEFSLSVYQKMKFNVAMGIGVLDWLRNSDDDDEDSQENADKNEDGGEKNMEDSGHETGIDSQSQGSFQAPQSSQSVHDHNQPYHICRGFTCFKKPPTPPPEPET

SEQ ID NO: 582 - protein, 708 aa, Artificial Sequence
  SV40 T Antigen mutant C105A/E107K
MDKVLNREESLQLMDLLGLERSAWGNIPLMRKAYLKKCKEFHPDKGGDEEKMKKMNTLYKKMEDGVKYAHQPDFGGFWDATEIPTYGTDEWEQWWNAFNEENLFASKEMPSSDDEATADSQHSTPPKKKRKVEDPKDFPSELLSFLSHAVFSNRTLACFAIYTTKEKAALLYKKIMEKYSVTFISRHNSYNHNILFFLTPHRHRVSAINNYAQKLCTFSFLICKGVNKEYLMYSALTRDPFSVIEESLPGGLKEHDFNPEEAEETKQVSWKLVTEYAMETKCDDVLLLLGMYLEFQYSFEMCLKCIKKEQPSHYKYHEKHYANAAIFADSKNQKTICQQAVDTVLAKKRVDSLQLTREQMLTNRFNDLLDRMDIMFGSTGSADIEEWMAGVAWLHCLLPKMDSVVYDFLKCMVYNIPKKRYWLFKGPIDSGKTTLAAALLELCGGKALNVNLPLDRLNFELGVAIDQFLVVFEDVKGTGGESRDLPSGQGINNLDNLRDYLDGSVKVNLEKKHLNKRTQIFPPGIVTMNEYSVPKTLQARFVKQIDFRPKDYLKHCLERSEFLLEKRIIQSGIALLLMLIWYRPVAEFAQSIQSRIVEWKERLDKEFSLSVYQKMKFNVAMGIGVLDWLRNSDDDDEDSQENADKNEDGGEKNMEDSGHETGIDSQSQGSFQAPQSSQSVHDHNQPYHICRGFTCFKKPPTPPPEPET

SEQ ID NO: 583 - protein, 708 aa, Artificial Sequence
  SV40 T Antigen mutant C105A/D402E
MDKVLNREESLQLMDLLGLERSAWGNIPLMRKAYLKKCKEFHPDKGGDEEKMKKMNTLYKKMEDGVKYAHQPDFGGFWDATEIPTYGTDEWEQWWNAFNEENLFASEEMPSSDDEATADSQHSTPPKKKRKVEDPKDFPSELLSFLSHAVFSNRTLACFAIYTTKEKAALLYKKIMEKYSVTFISRHNSYNHNILFFLTPHRHRVSAINNYAQKLCTFSFLICKGVNKEYLMYSALTRDPFSVIEESLPGGLKEHDFNPEEAEETKQVSWKLVTEYAMETKCDDVLLLLGMYLEFQYSFEMCLKCIKKEQPSHYKYHEKHYANAAIFADSKNQKTICQQAVDTVLAKKRVDSLQLTREQMLTNRFNDLLDRMDIMFGSTGSADIEEWMAGVAWLHCLLPKMESVVYDFLKCMVYNIPKKRYWLFKGPIDSGKTTLAAALLELCGGKALNVNLPLDRLNFELGVAIDQFLVVFEDVKGTGGESRDLPSGQGINNLDNLRDYLDGSVKVNLEKKHLNKRTQIFPPGIVTMNEYSVPKTLQARFVKQIDFRPKDYLKHCLERSEFLLEKRIIQSGIALLLMLIWYRPVAEFAQSIQSRIVEWKERLDKEFSLSVYQKMKFNVAMGIGVLDWLRNSDDDDEDSQENADKNEDGGEKNMEDSGHETGIDSQSQGSFQAPQSSQSVHDHNQPYHICRGFTCFKKPPTPPPEPET

SEQ ID NO: 584 - protein, 708 aa, Artificial Sequence
  SV40 T Antigen mutant C105A/V585R
MDKVLNREESLQLMDLLGLERSAWGNIPLMRKAYLKKCKEFHPDKGGDEEKMKKMNTLYKKMEDGVKYAHQPDFGGFWDATEIPTYGTDEWEQWWNAFNEENLFASEEMPSSDDEATADSQHSTPPKKKRKVEDPKDFPSELLSFLSHAVFSNRTLACFAIYTTKEKAALLYKKIMEKYSVTFISRHNSYNHNILFFLTPHRHRVSAINNYAQKLCTFSFLICKGVNKEYLMYSALTRDPFSVIEESLPGGLKEHDFNPEEAEETKQVSWKLVTEYAMETKCDDVLLLLGMYLEFQYSFEMCLKCIKKEQPSHYKYHEKHYANAAIFADSKNQKTICQQAVDTVLAKKRVDSLQLTREQMLTNRFNDLLDRMDIMFGSTGSADIEEWMAGVAWLHCLLPKMDSVVYDFLKCMVYNIPKKRYWLFKGPIDSGKTTLAAALLELCGGKALNVNLPLDRLNFELGVAIDQFLVVFEDVKGTGGESRDLPSGQGINNLDNLRDYLDGSVKVNLEKKHLNKRTQIFPPGIVTMNEYSVPKTLQARFVKQIDFRPKDYLKHCLERSEFLLEKRIIQSGIALLLMLIWYRPRAEFAQSIQSRIVEWKERLDKEFSLSVYQKMKFNVAMGIGVLDWLRNSDDDDEDSQENADKNEDGGEKNMEDSGHETGIDSQSQGSFQAPQSSQSVHDHNQPYHICRGFTCFKKPPTPPPEPET

SEQ ID NO: 585 - protein, 708 aa, Artificial Sequence
  SV40 T Antigen mutant E107K/V585R
MDKVLNREESLQLMDLLGLERSAWGNIPLMRKAYLKKCKEFHPDKGGDEEKMKKMNTLYKKMEDGVKYAHQPDFGGFWDATEIPTYGTDEWEQWWNAFNEENLFCSKEMPSSDDEATADSQHSTPPKKKRKVEDPKDFPSELLSFLSHAVFSNRTLACFAIYTTKEKAALLYKKIMEKYSVTFISRHNSYNHNILFFLTPHRHRVSAINNYAQKLCTFSFLICKGVNKEYLMYSALTRDPFSVIEESLPGGLKEHDFNPEEAEETKQVSWKLVTEYAMETKCDDVLLLLGMYLEFQYSFEMCLKCIKKEQPSHYKYHEKHYANAAIFADSKNQKTICQQAVDTVLAKKRVDSLQLTREQMLTNRFNDLLDRMDIMFGSTGSADIEEWMAGVAWLHCLLPKMDSVVYDFLKCMVYNIPKKRYWLFKGPIDSGKTTLAAALLELCGGKALNVNLPLDRLNFELGVAIDQFLVVFEDVKGTGGESRDLPSGQGINNLDNLRDYLDGSVKVNLEKKHLNKRTQIFPPGIVTMNEYSVPKTLQARFVKQIDFRPKDYLKHCLERSEFLLEKRIIQSGIALLLMLIWYRPRAEFAQSIQSRIVEWKERLDKEFSLSVYQKMKFNVAMGIGVLDWLRNSDDDDEDSQENADKNEDGGEKNMEDSGHETGIDSQSQGSFQAPQSSQSVHDHNQPYHICRGFTCFKKPPTPPPEPET

SEQ ID NO: 586 - protein, 708 aa, Artificial Sequence
  SV40 T Antigen mutant E107K/D402E
MDKVLNREESLQLMDLLGLERSAWGNIPLMRKAYLKKCKEFHPDKGGDEEKMKKMNTLYKKMEDGVKYAHQPDFGGFWDATEIPTYGTDEWEQWWNAFNEENLFCSKEMPSSDDEATADSQHSTPPKKKRKVEDPKDFPSELLSFLSHAVFSNRTLACFAIYTTKEKAALLYKKIMEKYSVTFISRHNSYNHNILFFLTPHRHRVSAINNYAQKLCTFSFLICKGVNKEYLMYSALTRDPFSVIEESLPGGLKEHDFNPEEAEETKQVSWKLVTEYAMETKCDDVLLLLGMYLEFQYSFEMCLKCIKKEQPSHYKYHEKHYANAAIFADSKNQKTICQQAVDTVLAKKRVDSLQLTREQMLTNRFNDLLDRMDIMFGSTGSADIEEWMAGVAWLHCLLPKMESVVYDFLKCMVYNIPKKRYWLFKGPIDSGKTTLAAALLELCGGKALNVNLPLDRLNFELGVAIDQFLVVFEDVKGTGGESRDLPSGQGINNLDNLRDYLDGSVKVNLEKKHLNKRTQIFPPGIVTMNEYSVPKTLQARFVKQIDFRPKDYLKHCLERSEFLLEKRIIQSGIALLLMLIWYRPVAEFAQSIQSRIVEWKERLDKEFSLSVYQKMKFNVAMGIGVLDWLRNSDDDDEDSQENADKNEDGGEKNMEDSGHETGIDSQSQGSFQAPQSSQSVHDHNQPYHICRGFTCFKKPPTPPPEPET

SEQ ID NO: 587 - protein, 708 aa, Artificial Sequence
  SV40 T Antigen mutant L103P/D402E
MDKVLNREESLQLMDLLGLERSAWGNIPLMRKAYLKKCKEFHPDKGGDEEKMKKMNTLYKKMEDGVKYAHQPDFGGFWDATEIPTYGTDEWEQWWNAFNEENPFCSEEMPSSDDEATADSQHSTPPKKKRKVEDPKDFPSELLSFLSHAVFSNRTLACFAIYTTKEKAALLYKKIMEKYSVTFISRHNSYNHNILFFLTPHRHRVSAINNYAQKLCTFSFLICKGVNKEYLMYSALTRDPFSVIEESLPGGLKEHDFNPEEAEETKQVSWKLVTEYAMETKCDDVLLLLGMYLEFQYSFEMCLKCIKKEQPSHYKYHEKHYANAAIFADSKNQKTICQQAVDTVLAKKRVDSLQLTREQMLTNRFNDLLDRMDIMFGSTGSADIEEWMAGVAWLHCLLPKMESVVYDFLKCMVYNIPKKRYWLFKGPIDSGKTTLAAALLELCGGKALNVNLPLDRLNFELGVAIDQFLVVFEDVKGTGGESRDLPSGQGINNLDNLRDYLDGSVKVNLEKKHLNKRTQIFPPGIVTMNEYSVPKTLQARFVKQIDFRPKDYLKHCLERSEFLLEKRIIQSGIALLLMLIWYRPVAEFAQSIQSRIVEWKERLDKEFSLSVYQKMKFNVAMGIGVLDWLRNSDDDDEDSQENADKNEDGGEKNMEDSGHETGIDSQSQGSFQAPQSSQSVHDHNQPYHICRGFTCFKKPPTPPPEPET

SEQ ID NO: 588 - protein, 708 aa, Artificial Sequence
  SV40 T Antigen mutant L103P/V585R
MDKVLNREESLQLMDLLGLERSAWGNIPLMRKAYLKKCKEFHPDKGGDEEKMKKMNTLYKKMEDGVKYAHQPDFGGFWDATEIPTYGTDEWEQWWNAFNEENPFCSEEMPSSDDEATADSQHSTPPKKKRKVEDPKDFPSELLSFLSHAVFSNRTLACFAIYTTKEKAALLYKKIMEKYSVTFISRHNSYNHNILFFLTPHRHRVSAINNYAQKLCTFSFLICKGVNKEYLMYSALTRDPFSVIEESLPGGLKEHDFNPEEAEETKQVSWKLVTEYAMETKCDDVLLLLGMYLEFQYSFEMCLKCIKKEQPSHYKYHEKHYANAAIFADSKNQKTICQQAVDTVLAKKRVDSLQLTREQMLTNRFNDLLDRMDIMFGSTGSADIEEWMAGVAWLHCLLPKMDSVVYDFLKCMVYNIPKKRYWLFKGPIDSGKTTLAAALLELCGGKALNVNLPLDRLNFELGVAIDQFLVVFEDVKGTGGESRDLPSGQGINNLDNLRDYLDGSVKVNLEKKHLNKRTQIFPPGIVTMNEYSVPKTLQARFVKQIDFRPKDYLKHCLERSEFLLEKRIIQSGIALLLMLIWYRPRAEFAQSIQSRIVEWKERLDKEFSLSVYQKMKFNVAMGIGVLDWLRNSDDDDEDSQENADKNEDGGEKNMEDSGHETGIDSQSQGSFQAPQSSQSVHDHNQPYHICRGFTCFKKPPTPPPEPET

SEQ ID NO: 589 - protein, 708 aa, Artificial Sequence
  SV40 T Antigen mutant E107L/E108L/D402R
MDKVLNREESLQLMDLLGLERSAWGNIPLMRKAYLKKCKEFHPDKGGDEEKMKKMNTLYKKMEDGVKYAHQPDFGGFWDATEIPTYGTDEWEQWWNAFNEENLFCSLLMPSSDDEATADSQHSTPPKKKRKVEDPKDFPSELLSFLSHAVFSNRTLACFAIYTTKEKAALLYKKIMEKYSVTFISRHNSYNHNILFFLTPHRHRVSAINNYAQKLCTFSFLICKGVNKEYLMYSALTRDPFSVIEESLPGGLKEHDFNPEEAEETKQVSWKLVTEYAMETKCDDVLLLLGMYLEFQYSFEMCLKCIKKEQPSHYKYHEKHYANAAIFADSKNQKTICQQAVDTVLAKKRVDSLQLTREQMLTNRFNDLLDRMDIMFGSTGSADIEEWMAGVAWLHCLLPKMRSVVYDFLKCMVYNIPKKRYWLFKGPIDSGKTTLAAALLELCGGKALNVNLPLDRLNFELGVAIDQFLVVFEDVKGTGGESRDLPSGQGINNLDNLRDYLDGSVKVNLEKKHLNKRTQIFPPGIVTMNEYSVPKTLQARFVKQIDFRPKDYLKHCLERSEFLLEKRIIQSGIALLLMLIWYRPVAEFAQSIQSRIVEWKERLDKEFSLSVYQKMKFNVAMGIGVLDWLRNSDDDDEDSQENADKNEDGGEKNMEDSGHETGIDSQSQGSFQAPQSSQSVHDHNQPYHICRGFTCFKKPPTPPPEPET

SEQ ID NO: 590 - protein, 708 aa, Artificial Sequence
  SV40 T Antigen mutant E107L/E108L/P453S
MDKVLNREESLQLMDLLGLERSAWGNIPLMRKAYLKKCKEFHPDKGGDEEKMKKMNTLYKKMEDGVKYAHQPDFGGFWDATEIPTYGTDEWEQWWNAFNEENLFCSLLMPSSDDEATADSQHSTPPKKKRKVEDPKDFPSELLSFLSHAVFSNRTLACFAIYTTKEKAALLYKKIMEKYSVTFISRHNSYNHNILFFLTPHRHRVSAINNYAQKLCTFSFLICKGVNKEYLMYSALTRDPFSVIEESLPGGLKEHDFNPEEAEETKQVSWKLVTEYAMETKCDDVLLLLGMYLEFQYSFEMCLKCIKKEQPSHYKYHEKHYANAAIFADSKNQKTICQQAVDTVLAKKRVDSLQLTREQMLTNRFNDLLDRMDIMFGSTGSADIEEWMAGVAWLHCLLPKMDSVVYDFLKCMVYNIPKKRYWLFKGPIDSGKTTLAAALLELCGGKALNVNLSLDRLNFELGVAIDQFLVVFEDVKGTGGESRDLPSGQGINNLDNLRDYLDGSVKVNLEKKHLNKRTQIFPPGIVTMNEYSVPKTLQARFVKQIDFRPKDYLKHCLERSEFLLEKRIIQSGIALLLMLIWYRPVAEFAQSIQSRIVEWKERLDKEFSLSVYQKMKFNVAMGIGVLDWLRNSDDDDEDSQENADKNEDGGEKNMEDSGHETGIDSQSQGSFQAPQSSQSVHDHNQPYHICRGFTCFKKPPTPPPEPET

SEQ ID NO: 591 - protein, 708 aa, Artificial Sequence
  SV40 T Antigen mutant E107L/E108L/V585R
MDKVLNREESLQLMDLLGLERSAWGNIPLMRKAYLKKCKEFHPDKGGDEEKMKKMNTLYKKMEDGVKYAHQPDFGGFWDATEIPTYGTDEWEQWWNAFNEENLFCSLLMPSSDDEATADSQHSTPPKKKRKVEDPKDFPSELLSFLSHAVFSNRTLACFAIYTTKEKAALLYKKIMEKYSVTFISRHNSYNHNILFFLTPHRHRVSAINNYAQKLCTFSFLICKGVNKEYLMYSALTRDPFSVIEESLPGGLKEHDFNPEEAEETKQVSWKLVTEYAMETKCDDVLLLLGMYLEFQYSFEMCLKCIKKEQPSHYKYHEKHYANAAIFADSKNQKTICQQAVDTVLAKKRVDSLQLTREQMLTNRFNDLLDRMDIMFGSTGSADIEEWMAGVAWLHCLLPKMDSVVYDFLKCMVYNIPKKRYWLFKGPIDSGKTTLAAALLELCGGKALNVNLPLDRLNFELGVAIDQFLVVFEDVKGTGGESRDLPSGQGINNLDNLRDYLDGSVKVNLEKKHLNKRTQIFPPGIVTMNEYSVPKTLQARFVKQIDFRPKDYLKHCLERSEFLLEKRIIQSGIALLLMLIWYRPRAEFAQSIQSRIVEWKERLDKEFSLSVYQKMKFNVAMGIGVLDWLRNSDDDDEDSQENADKNEDGGEKNMEDSGHETGIDSQSQGSFQAPQSSQSVHDHNQPYHICRGFTCFKKPPTPPPEPET

SEQ ID NO: 592 - protein, 708 aa, Artificial Sequence
  SV40 T Antigen mutant E107L/E108L/D604R
MDKVLNREESLQLMDLLGLERSAWGNIPLMRKAYLKKCKEFHPDKGGDEEKMKKMNTLYKKMEDGVKYAHQPDFGGFWDATEIPTYGTDEWEQWWNAFNEENLFCSLLMPSSDDEATADSQHSTPPKKKRKVEDPKDFPSELLSFLSHAVFSNRTLACFAIYTTKEKAALLYKKIMEKYSVTFISRHNSYNHNILFFLTPHRHRVSAINNYAQKLCTFSFLICKGVNKEYLMYSALTRDPFSVIEESLPGGLKEHDFNPEEAEETKQVSWKLVTEYAMETKCDDVLLLLGMYLEFQYSFEMCLKCIKKEQPSHYKYHEKHYANAAIFADSKNQKTICQQAVDTVLAKKRVDSLQLTREQMLTNRFNDLLDRMDIMFGSTGSADIEEWMAGVAWLHCLLPKMDSVVYDFLKCMVYNIPKKRYWLFKGPIDSGKTTLAAALLELCGGKALNVNLPLDRLNFELGVAIDQFLVVFEDVKGTGGESRDLPSGQGINNLDNLRDYLDGSVKVNLEKKHLNKRTQIFPPGIVTMNEYSVPKTLQARFVKQIDFRPKDYLKHCLERSEFLLEKRIIQSGIALLLMLIWYRPVAEFAQSIQSRIVEWKERLRKEFSLSVYQKMKFNVAMGIGVLDWLRNSDDDDEDSQENADKNEDGGEKNMEDSGHETGIDSQSQGSFQAPQSSQSVHDHNQPYHICRGFTCFKKPPTPPPEPET

SEQ ID NO: 593 - protein, 708 aa, Artificial Sequence
  SV40 T Antigen mutant L19F/E107L/E108L/D402R
MDKVLNREESLQLMDLLGFERSAWGNIPLMRKAYLKKCKEFHPDKGGDEEKMKKMNTLYKKMEDGVKYAHQPDFGGFWDATEIPTYGTDEWEQWWNAFNEENLFCSLLMPSSDDEATADSQHSTPPKKKRKVEDPKDFPSELLSFLSHAVFSNRTLACFAIYTTKEKAALLYKKIMEKYSVTFISRHNSYNHNILFFLTPHRHRVSAINNYAQKLCTFSFLICKGVNKEYLMYSALTRDPFSVIEESLPGGLKEHDFNPEEAEETKQVSWKLVTEYAMETKCDDVLLLLGMYLEFQYSFEMCLKCIKKEQPSHYKYHEKHYANAAIFADSKNQKTICQQAVDTVLAKKRVDSLQLTREQMLTNRFNDLLDRMDIMFGSTGSADIEEWMAGVAWLHCLLPKMRSVVYDFLKCMVYNIPKKRYWLFKGPIDSGKTTLAAALLELCGGKALNVNLPLDRLNFELGVAIDQFLVVFEDVKGTGGESRDLPSGQGINNLDNLRDYLDGSVKVNLEKKHLNKRTQIFPPGIVTMNEYSVPKTLQARFVKQIDFRPKDYLKHCLERSEFLLEKRIIQSGIALLLMLIWYRPVAEFAQSIQSRIVEWKERLDKEFSLSVYQKMKFNVAMGIGVLDWLRNSDDDDEDSQENADKNEDGGEKNMEDSGHETGIDSQSQGSFQAPQSSQSVHDHNQPYHICRGFTCFKKPPTPPPEPET

SEQ ID NO: 594 - protein, 708 aa, Artificial Sequence
  SV40 T Antigen mutant L19F/E107L/E108L/P453S
MDKVLNREESLQLMDLLGFERSAWGNIPLMRKAYLKKCKEFHPDKGGDEEKMKKMNTLYKKMEDGVKYAHQPDFGGFWDATEIPTYGTDEWEQWWNAFNEENLFCSLLMPSSDDEATADSQHSTPPKKKRKVEDPKDFPSELLSFLSHAVFSNRTLACFAIYTTKEKAALLYKKIMEKYSVTFISRHNSYNHNILFFLTPHRHRVSAINNYAQKLCTFSFLICKGVNKEYLMYSALTRDPFSVIEESLPGGLKEHDFNPEEAEETKQVSWKLVTEYAMETKCDDVLLLLGMYLEFQYSFEMCLKCIKKEQPSHYKYHEKHYANAAIFADSKNQKTICQQAVDTVLAKKRVDSLQLTREQMLTNRFNDLLDRMDIMFGSTGSADIEEWMAGVAWLHCLLPKMDSVVYDFLKCMVYNIPKKRYWLFKGPIDSGKTTLAAALLELCGGKALNVNLSLDRLNFELGVAIDQFLVVFEDVKGTGGESRDLPSGQGINNLDNLRDYLDGSVKVNLEKKHLNKRTQIFPPGIVTMNEYSVPKTLQARFVKQIDFRPKDYLKHCLERSEFLLEKRIIQSGIALLLMLIWYRPVAEFAQSIQSRIVEWKERLDKEFSLSVYQKMKFNVAMGIGVLDWLRNSDDDDEDSQENADKNEDGGEKNMEDSGHETGIDSQSQGSFQAPQSSQSVHDHNQPYHICRGFTCFKKPPTPPPEPET

SEQ ID NO: 595 - protein, 708 aa, Artificial Sequence
  SV40 T Antigen mutant L19F/E107L/E108L/V585R
MDKVLNREESLQLMDLLGFERSAWGNIPLMRKAYLKKCKEFHPDKGGDEEKMKKMNTLYKKMEDGVKYAHQPDFGGFWDATEIPTYGTDEWEQWWNAFNEENLFCSLLMPSSDDEATADSQHSTPPKKKRKVEDPKDFPSELLSFLSHAVFSNRTLACFAIYTTKEKAALLYKKIMEKYSVTFISRHNSYNHNILFFLTPHRHRVSAINNYAQKLCTFSFLICKGVNKEYLMYSALTRDPFSVIEESLPGGLKEHDFNPEEAEETKQVSWKLVTEYAMETKCDDVLLLLGMYLEFQYSFEMCLKCIKKEQPSHYKYHEKHYANAAIFADSKNQKTICQQAVDTVLAKKRVDSLQLTREQMLTNRFNDLLDRMDIMFGSTGSADIEEWMAGVAWLHCLLPKMDSVVYDFLKCMVYNIPKKRYWLFKGPIDSGKTTLAAALLELCGGKALNVNLPLDRLNFELGVAIDQFLVVFEDVKGTGGESRDLPSGQGINNLDNLRDYLDGSVKVNLEKKHLNKRTQIFPPGIVTMNEYSVPKTLQARFVKQIDFRPKDYLKHCLERSEFLLEKRIIQSGIALLLMLIWYRPRAEFAQSIQSRIVEWKERLDKEFSLSVYQKMKFNVAMGIGVLDWLRNSDDDDEDSQENADKNEDGGEKNMEDSGHETGIDSQSQGSFQAPQSSQSVHDHNQPYHICRGFTCFKKPPTPPPEPET

SEQ ID NO: 596 - protein, 708 aa, Artificial Sequence
  SV40 T Antigen mutant L19F/E107L/E108L/D604R
MDKVLNREESLQLMDLLGFERSAWGNIPLMRKAYLKKCKEFHPDKGGDEEKMKKMNTLYKKMEDGVKYAHQPDFGGFWDATEIPTYGTDEWEQWWNAFNEENLFCSLLMPSSDDEATADSQHSTPPKKKRKVEDPKDFPSELLSFLSHAVFSNRTLACFAIYTTKEKAALLYKKIMEKYSVTFISRHNSYNHNILFFLTPHRHRVSAINNYAQKLCTFSFLICKGVNKEYLMYSALTRDPFSVIEESLPGGLKEHDFNPEEAEETKQVSWKLVTEYAMETKCDDVLLLLGMYLEFQYSFEMCLKCIKKEQPSHYKYHEKHYANAAIFADSKNQKTICQQAVDTVLAKKRVDSLQLTREQMLTNRFNDLLDRMDIMFGSTGSADIEEWMAGVAWLHCLLPKMDSVVYDFLKCMVYNIPKKRYWLFKGPIDSGKTTLAAALLELCGGKALNVNLPLDRLNFELGVAIDQFLVVFEDVKGTGGESRDLPSGQGINNLDNLRDYLDGSVKVNLEKKHLNKRTQIFPPGIVTMNEYSVPKTLQARFVKQIDFRPKDYLKHCLERSEFLLEKRIIQSGIALLLMLIWYRPVAEFAQSIQSRIVEWKERLRKEFSLSVYQKMKFNVAMGIGVLDWLRNSDDDDEDSQENADKNEDGGEKNMEDSGHETGIDSQSQGSFQAPQSSQSVHDHNQPYHICRGFTCFKKPPTPPPEPET

SEQ ID NO: 597 - protein, 708 aa, Artificial Sequence
  SV40 T Antigen mutant P28S/E107L/E108L/D402R
MDKVLNREESLQLMDLLGLERSAWGNISLMRKAYLKKCKEFHPDKGGDEEKMKKMNTLYKKMEDGVKYAHQPDFGGFWDATEIPTYGTDEWEQWWNAFNEENLFCSLLMPSSDDEATADSQHSTPPKKKRKVEDPKDFPSELLSFLSHAVFSNRTLACFAIYTTKEKAALLYKKIMEKYSVTFISRHNSYNHNILFFLTPHRHRVSAINNYAQKLCTFSFLICKGVNKEYLMYSALTRDPFSVIEESLPGGLKEHDFNPEEAEETKQVSWKLVTEYAMETKCDDVLLLLGMYLEFQYSFEMCLKCIKKEQPSHYKYHEKHYANAAIFADSKNQKTICQQAVDTVLAKKRVDSLQLTREQMLTNRFNDLLDRMDIMFGSTGSADIEEWMAGVAWLHCLLPKMRSVVYDFLKCMVYNIPKKRYWLFKGPIDSGKTTLAAALLELCGGKALNVNLPLDRLNFELGVAIDQFLVVFEDVKGTGGESRDLPSGQGINNLDNLRDYLDGSVKVNLEKKHLNKRTQIFPPGIVTMNEYSVPKTLQARFVKQIDFRPKDYLKHCLERSEFLLEKRIIQSGIALLLMLIWYRPVAEFAQSIQSRIVEWKERLDKEFSLSVYQKMKFNVAMGIGVLDWLRNSDDDDEDSQENADKNEDGGEKNMEDSGHETGIDSQSQGSFQAPQSSQSVHDHNQPYHICRGFTCFKKPPTPPPEPET

SEQ ID NO: 598 - protein, 708 aa, Artificial Sequence
  SV40 T Antigen mutant P28S/E107L/E108L/P453S
MDKVLNREESLQLMDLLGLERSAWGNISLMRKAYLKKCKEFHPDKGGDEEKMKKMNTLYKKMEDGVKYAHQPDFGGFWDATEIPTYGTDEWEQWWNAFNEENLFCSLLMPSSDDEATADSQHSTPPKKKRKVEDPKDFPSELLSFLSHAVFSNRTLACFAIYTTKEKAALLYKKIMEKYSVTFISRHNSYNHNILFFLTPHRHRVSAINNYAQKLCTFSFLICKGVNKEYLMYSALTRDPFSVIEESLPGGLKEHDFNPEEAEETKQVSWKLVTEYAMETKCDDVLLLLGMYLEFQYSFEMCLKCIKKEQPSHYKYHEKHYANAAIFADSKNQKTICQQAVDTVLAKKRVDSLQLTREQMLTNRFNDLLDRMDIMFGSTGSADIEEWMAGVAWLHCLLPKMDSVVYDFLKCMVYNIPKKRYWLFKGPIDSGKTTLAAALLELCGGKALNVNLSLDRLNFELGVAIDQFLVVFEDVKGTGGESRDLPSGQGINNLDNLRDYLDGSVKVNLEKKHLNKRTQIFPPGIVTMNEYSVPKTLQARFVKQIDFRPKDYLKHCLERSEFLLEKRIIQSGIALLLMLIWYRPVAEFAQSIQSRIVEWKERLDKEFSLSVYQKMKFNVAMGIGVLDWLRNSDDDDEDSQENADKNEDGGEKNMEDSGHETGIDSQSQGSFQAPQSSQSVHDHNQPYHICRGFTCFKKPPTPPPEPET

SEQ ID NO: 599 - protein, 708 aa, Artificial Sequence
  SV40 T Antigen mutant P28S/E107L/E108L/V585R
MDKVLNREESLQLMDLLGLERSAWGNISLMRKAYLKKCKEFHPDKGGDEEKMKKMNTLYKKMEDGVKYAHQPDFGGFWDATEIPTYGTDEWEQWWNAFNEENLFCSLLMPSSDDEATADSQHSTPPKKKRKVEDPKDFPSELLSFLSHAVFSNRTLACFAIYTTKEKAALLYKKIMEKYSVTFISRHNSYNHNILFFLTPHRHRVSAINNYAQKLCTFSFLICKGVNKEYLMYSALTRDPFSVIEESLPGGLKEHDFNPEEAEETKQVSWKLVTEYAMETKCDDVLLLLGMYLEFQYSFEMCLKCIKKEQPSHYKYHEKHYANAAIFADSKNQKTICQQAVDTVLAKKRVDSLQLTREQMLTNRFNDLLDRMDIMFGSTGSADIEEWMAGVAWLHCLLPKMDSVVYDFLKCMVYNIPKKRYWLFKGPIDSGKTTLAAALLELCGGKALNVNLPLDRLNFELGVAIDQFLVVFEDVKGTGGESRDLPSGQGINNLDNLRDYLDGSVKVNLEKKHLNKRTQIFPPGIVTMNEYSVPKTLQARFVKQIDFRPKDYLKHCLERSEFLLEKRIIQSGIALLLMLIWYRPRAEFAQSIQSRIVEWKERLDKEFSLSVYQKMKFNVAMGIGVLDWLRNSDDDDEDSQENADKNEDGGEKNMEDSGHETGIDSQSQGSFQAPQSSQSVHDHNQPYHICRGFTCFKKPPTPPPEPET

SEQ ID NO: 600 - protein, 708 aa, Artificial Sequence
  SV40 T Antigen mutant P28S/E107L/E108L/D604R
MDKVLNREESLQLMDLLGLERSAWGNISLMRKAYLKKCKEFHPDKGGDEEKMKKMNTLYKKMEDGVKYAHQPDFGGFWDATEIPTYGTDEWEQWWNAFNEENLFCSLLMPSSDDEATADSQHSTPPKKKRKVEDPKDFPSELLSFLSHAVFSNRTLACFAIYTTKEKAALLYKKIMEKYSVTFISRHNSYNHNILFFLTPHRHRVSAINNYAQKLCTFSFLICKGVNKEYLMYSALTRDPFSVIEESLPGGLKEHDFNPEEAEETKQVSWKLVTEYAMETKCDDVLLLLGMYLEFQYSFEMCLKCIKKEQPSHYKYHEKHYANAAIFADSKNQKTICQQAVDTVLAKKRVDSLQLTREQMLTNRFNDLLDRMDIMFGSTGSADIEEWMAGVAWLHCLLPKMDSVVYDFLKCMVYNIPKKRYWLFKGPIDSGKTTLAAALLELCGGKALNVNLPLDRLNFELGVAIDQFLVVFEDVKGTGGESRDLPSGQGINNLDNLRDYLDGSVKVNLEKKHLNKRTQIFPPGIVTMNEYSVPKTLQARFVKQIDFRPKDYLKHCLERSEFLLEKRIIQSGIALLLMLIWYRPVAEFAQSIQSRIVEWKERLRKEFSLSVYQKMKFNVAMGIGVLDWLRNSDDDDEDSQENADKNEDGGEKNMEDSGHETGIDSQSQGSFQAPQSSQSVHDHNQPYHICRGFTCFKKPPTPPPEPET

SEQ ID NO: 601 - protein, 708 aa, Artificial Sequence
  SV40 T Antigen mutant L19F/P28S/L103P/C105A/E107L/E108L/V585R
MDKVLNREESLQLMDLLGFERSAWGNISLMRKAYLKKCKEFHPDKGGDEEKMKKMNTLYKKMEDGVKYAHQPDFGGFWDATEIPTYGTDEWEQWWNAFNEENPFASLLMPSSDDEATADSQHSTPPKKKRKVEDPKDFPSELLSFLSHAVFSNRTLACFAIYTTKEKAALLYKKIMEKYSVTFISRHNSYNHNILFFLTPHRHRVSAINNYAQKLCTFSFLICKGVNKEYLMYSALTRDPFSVIEESLPGGLKEHDFNPEEAEETKQVSWKLVTEYAMETKCDDVLLLLGMYLEFQYSFEMCLKCIKKEQPSHYKYHEKHYANAAIFADSKNQKTICQQAVDTVLAKKRVDSLQLTREQMLTNRFNDLLDRMDIMFGSTGSADIEEWMAGVAWLHCLLPKMDSVVYDFLKCMVYNIPKKRYWLFKGPIDSGKTTLAAALLELCGGKALNVNLPLDRLNFELGVAIDQFLVVFEDVKGTGGESRDLPSGQGINNLDNLRDYLDGSVKVNLEKKHLNKRTQIFPPGIVTMNEYSVPKTLQARFVKQIDFRPKDYLKHCLERSEFLLEKRIIQSGIALLLMLIWYRPRAEFAQSIQSRIVEWKERLDKEFSLSVYQKMKFNVAMGIGVLDWLRNSDDDDEDSQENADKNEDGGEKNMEDSGHETGIDSQSQGSFQAPQSSQSVHDHNQPYHICRGFTCFKKPPTPPPEPET

SEQ ID NO: 602 - protein, 708 aa, Artificial Sequence
  SV40 T Antigen mutant L19F/P28S/L103P/C105A/E107L/E108L/D604R
MDKVLNREESLQLMDLLGFERSAWGNISLMRKAYLKKCKEFHPDKGGDEEKMKKMNTLYKKMEDGVKYAHQPDFGGFWDATEIPTYGTDEWEQWWNAFNEENPFASLLMPSSDDEATADSQHSTPPKKKRKVEDPKDFPSELLSFLSHAVFSNRTLACFAIYTTKEKAALLYKKIMEKYSVTFISRHNSYNHNILFFLTPHRHRVSAINNYAQKLCTFSFLICKGVNKEYLMYSALTRDPFSVIEESLPGGLKEHDFNPEEAEETKQVSWKLVTEYAMETKCDDVLLLLGMYLEFQYSFEMCLKCIKKEQPSHYKYHEKHYANAAIFADSKNQKTICQQAVDTVLAKKRVDSLQLTREQMLTNRFNDLLDRMDIMFGSTGSADIEEWMAGVAWLHCLLPKMDSVVYDFLKCMVYNIPKKRYWLFKGPIDSGKTTLAAALLELCGGKALNVNLPLDRLNFELGVAIDQFLVVFEDVKGTGGESRDLPSGQGINNLDNLRDYLDGSVKVNLEKKHLNKRTQIFPPGIVTMNEYSVPKTLQARFVKQIDFRPKDYLKHCLERSEFLLEKRIIQSGIALLLMLIWYRPVAEFAQSIQSRIVEWKERLRKEFSLSVYQKMKFNVAMGIGVLDWLRNSDDDDEDSQENADKNEDGGEKNMEDSGHETGIDSQSQGSFQAPQSSQSVHDHNQPYHICRGFTCFKKPPTPPPEPET

SEQ ID NO: 603 - protein, 692 aa, Artificial Sequence
  SV40 T Antigen mutant (366-370 deletion)
MDKVLNREESLQLMDLAYLKKCKEFHPDKGGDEEKMKKMNTLYKKMEDGVKYAHQPDFGGFWDATEIPTYGTDEWEQWWNAFNEENLFCSEEMPSSDDEATADSQHSTPPKKKRKVEDPKDFPSELLSFLSHAVFSNRTLACFAIYTTKEKAALLYKKIMEKYSVTFISRHNSYNHNILFFLTPHRHRVSAINNYAQKLCTFSFLICKGVNKEYLMYSALTRDPFSVIEESLPGGLKEHDFNPEEAEETKQVSWKLVTEYAMETKCDDVLLLLGMYLEFQYSFEMCLKCIKKEQPSHYKYHEKHYANAAIFADSKNQKTICQQAVDTVLAKKRVDSLQLTREQMLTNRFNDLLDRMDIMFGSTGSADIEEWMAGVAWLHCLLPKMDSVVYDFLKCMVYNIPKKRYWLFKGPIDSGKTTLAAALLELCGGKALNVNLPLDRLNFELGVAIDQFLVVFEDVKGTGGESRDLPSGQGINNLDNLRDYLDGSVKVNLEKKHLNKRTQIFPPGIVTMNEYSVPKTLQARFVKQIDFRPKDYLKHCLERSEFLLEKRIIQSGIALLLMLIWYRPVAEFAQSIQSRIVEWKERLDKEFSLSVYQKMKFNVAMGIGVLDWLRNSDDDDEDSQENADKNEDGGEKNMEDSGHETGIDSQSQGSFQAPQSSQSVHDHNQPYHICRGFTCFKKPPTPPPEPET

SEQ ID NO: 604 - protein, 697 aa, Artificial Sequence
  SV40 T Antigen mutant (434-444 deletion)
MDKVLNREESLQLMDLLGLERSAWGNIPLMRKAYLKKCKEFHPDKGGDEEKMKKMNTLYKKMEDGVKYAHQPDFGGFWDATEIPTYGTDEWEQWWNAFNEENLFCSEEMPSSDDEATADSQHSTPPKKKRKVEDPKDFPSELLSFLSHAVFSNRTLACFAIYTTKEKAALLYKKIMEKYSVTFISRHNSYNHNILFFLTPHRHRVSAINNYAQKLCTFSFLICKGVNKEYLMYSALTRDPFSVIEESLPGGLKEHDFNPEEAEETKQVSWKLVTEYAMETKCDDVLLLLGMYLEFQYSFEMCLKCIKKEQPSHYKYHEKHYANAAIFADSKNQKTICQQAVDTVLAKKRVDSLQLTREQMLTNRFNDLLDRMDIMFGSTGSADIEEWMAGVAWLHCLLPKMDSVVYDFLKCMVYNIPKKRYWLFKGPIDSGKTGKALNVNLPLDRLNFELGVAIDQFLVVFEDVKGTGGESRDLPSGQGINNLDNLRDYLDGSVKVNLEKKHLNKRTQIFPPGIVTMNEYSVPKTLQARFVKQIDFRPKDYLKHCLERSEFLLEKRIIQSGIALLLMLIWYRPVAEFAQSIQSRIVEWKERLDKEFSLSVYQKMKFNVAMGIGVLDWLRNSDDDDEDSQENADKNEDGGEKNMEDSGHETGIDSQSQGSFQAPQSSQSVHDHNQPYHICRGFTCFKKPPTPPPEPET

SEQ ID NO: 605 - DNA, 12 bp, Artificial Sequence
  Exemplary BstXI sequence (CCA(CAACCA)TGG)
ccacaaccatgg

SEQ ID NO: 606 - DNA, 3204 bp, Human herpesvirus 8
  Kaposi's sarcoma-associated herpesvirus glycoprotein M
  ref <308>: DATABASE ACCESSION NUMBER: GenBank: U93872.2
  ref <309>: DATABASE ENTRY DATE: 2007-10-19
atgcgcgcttcaaagagcgaccgttttctcatgtcctcctgggtcaagctgttgtttgtggctgtaattatgtacatttgctctgcagtcgtgcccatggccgccacgtacgagggccttggtttcccctgctacttcaacaatctggtaaactacagcgcgctaaacctcacggtgcgcaactcagcgaagcacctcaccccgaccctgtttttagagaaaccagagatgctggtgtacatattttggacttttatcgtggacggcattgccatagtatactactgtctcgcggcggtggccgtatatcgggccaagcatgttcacgccactaccatgatgagcatgcaatcctggatagcgctacttggatcacatagcgtgctttatgtcgccatcttaaggatgtggagcatgcaactgtttatccatgttctgtcatataaacacgtacttatggcagcctttgtctactgcattcatttttgcatatcctttgcccacatccagtcactgataacatgtaactccgcccagtgggaaatacctctcctggaacagcacgtacctgataataccatgatggagtcactgctgactcggtggaaaccggtctgcgtcaacctgtacctatcaacaaccgccttggaaatgctgctgttttcattgagcaccatgatggccgttggcaacagcttttacgtgctcgtgtcagacgccatttttggtgcggtgaacatgttcctagccttgacggtcgtgtggtacataaacacggaatttttcctggtaaagtttatgagacggcaggtaggcttttacgtgggagtattcgtgggttatctgattctactgctgcctgtcatcaggtatgaaaacgcgttcgtgcaggctaatctccactacatagtggctatcaatatctcctgtatccctatactgtgcatcctagccatcgttatacgcgttataaggagcgactggggactctgtacgccgagtgcggcatacatgcctctggcgacgtcggcgccgacggtcgatagaactccgactgttcaccagaaaccgccgcccctcccagcaaagaccagagcccgcgccaaagtgaaggacatatcgacgcccgccccgaggacccaataccagtccgaccatgaaagtgacagtgaaatcgacgaaacgcaaatgatattcatttagctgatatattggcattataaacccatccctcttcctccatcccccgttatttttcacccaccacggaataaaatacgtacagaaaaccatactgtttgcttaataaattgcttctttattttttttcttcttttttaatgcgggatatggggattgcgattgctcaagcaacatgcccttttctgaaacgcgaatggggtcatagtccacgactacgtcgagcggttccccgtccacgtctacgggctgtgagggacgtttgcagatagataggagaaatcccatttgatatatggaaaggtgtccttcgcacttcttgaccaaaagttggcagcttggtgaagcagacgatgctttgcgcctcggggaaagtagacgggggttacgattagcagcgtaggaatctccacgtgcgggtctaaagcatcgccaccgatggtacagttgacaggatcctgatagccccgctttctgaagaagccggtggcgatgtagtatttcggtgatccgaggcgaggaatgccgctatctaggccaatgtactcctcgacgatcgaactctgcagcaatacctgataaaagtagctgtgacggacgttcacgaagaggttggctttgaagcgggctttaatagtgatttgaccccgagtatcttgaggatcagtaagtacgtagacgtcagactccgtggtcgagttgtgcaaaatacactccctaataagattgtgaaggggcgttaatttcctctttttgcgaggacacgcctcccattcctgatcataagccaccaagtaatcagattcactgggcagttttccaagtcccacgtactcaaccgcaggcttggaaatgctatagaagaagtccttcagtgccagctttccgggtgcctcgtacagccgctgatacgcggcgtatatggggtcacactccattttcgcaaaggtgtacttgaacctgcattttatttcatacactttacagttagggtcaaactgtagacgaccctcggtgtcagttttgacgttcgccgcgaaatccagcgacacgccaaatattccattttgcggactctgcataaacccataatcgagacaatttgtctcgtccgggtgcaaaagggtggccagcaacgttttcaccacctcctcgcaccgcagcccaaaggcaagcgggcccgcgacaaagtggttgttcgttataggccatgggctgaatatcttttttgaagtgttctgttgtttaactgcccagtgaaacttggatgaagatataattccgtctcgcagggcgtcccacacggggttcagactctgactactagtggccctctccactagacagcagatgtggtgccgctgatgtgcgttcatttgcgaacaggcggcgtacacgctggccacgtccagtaacctgacaccaccaaacacacggtccacgaaaaagttacacacatcctcactaccaataaactcgcccacttttgaaaaaaggaaatagttgtaagccatgcgcagcgcaggcatgctgggttggagcttggcctgtgcgcaccagtctcgaaccttggcgtgctttagaaactttgaaaagctcaagcttgcgaggacagcctgttggtcatccactgttaacccatccagggtgtcaaccagatagtcttcagaaaacaagtccgcgggtgtgggggtggcctccatggttgaaaaagtctcgctctagtagctttctaacgagagactttaacatggggcagtttagcttatcggagcagttcgctaacgactctgccttttggttggctttatataaatagcactgcttctgaaacgccagctggtgctcctgtcgcatgggaatcgcctgggctttgccggtgcaatctagtcccaggtcaagcgtcatggtccacacagcggacaggatctgagtcatcaccaccctgggaatcatgaagcccaagtagtacatgggttcggggcgtccgtctctggtggctga

SEQ ID NO: 607 - DNA, 7343 bp, Artificial Sequence
  pCMV-zGFP-IRES-LTAgWT-BB3, (pC-zGFP-I-T-BB3, pCzGFP-I-T(WT)-BB3)
ttcctattaatagtaatcaattacggggtcattagttcatagcccatatatggagttccgcgttacataacttacggtaaatggcccgcctggctgaccgcccaacgacccccgcccattgacgtcaataatgacgtatgttcccatagtaacgccaatagggactttccattgacgtcaatgggtggagtatttacggtaaactgcccacttggcagtacatcaagtgtatcatatgccaagtacgccccctattgacgtcaatgacggtaaatggcccgcctggcattatgcccagtacatgaccttatgggactttcctacttggcagtacatctacgtattagtcatcgctattaccatggtgatgcggttttggcagtacatcaatgggcgtggatagcggtttgactcacggggatttccaagtctccaccccattgacgtcaatgggagtttgttttggcaccaaaatcaacgggactttccaaaatgtcgtaacaactccgccccattgacgcaaatgggcggtaggcgtgtacggtgggaggtctatataagcagagctggtttagtgaaccgtcagatccgctagctagaccatggtgagcaagggagaggaactctttacaggtgtggtcccaattctggtggagctggatggagatgtgaatgggcacaaattttctgtcagtggagagggagagggggatgctacctatggcaaactgactctgaagttcatctgcactactggcaagctgcctgtgccatggccaactctggtgacaaccctcacctatggagtccagtgcttttccagatatcctgaccacatgaaacagcatgactttttcaaatctgcaatgcctgagggctatgtgcaagagagaactatctttttcaaggatgatgggaactataagactagggctgaggtgaaatttgaaggagacaccctggtcaataggattgagctcaaggggattgacttcaaggaggatggcaacattctgggccataagctggagtataattacaattcccacaatgtctacattatggctgacaagcagaagaatggcattaaggtcaacttcaagattagacacaacatagaggatggatctgtgcagctggctgaccattaccagcagaatacacctattggggatgggccagtgctgctccctgacaatcactatctgagcacccaatctgctttgtctaaagatcctaatgaaaagagagatcacatggtgctgctggagtttgtaactgctgcaggaattaccttgggtatggatgaactctataagtaaggatccgcccctctccctcccccccccctaacgttactggccgaagccgcttggaataaggccggtgtgcgtttgtctatatgttattttccaccatattgccgtcttttggcaatgtgagggcccggaaacctggccctgtcttcttgacgagcattcctaggggtctttcccctctcgccaaaggaatgcaaggtctgttgaatgtcgtgaaggaagcagttcctctggaagcttcttgaagacaaacaacgtctgtagcgaccctttgcaggcagcggaaccccccacctggcgacaggtgcctctgcggccaaaagccacgtgtataagatacacctgcaaaggcggcacaaccccagtgccacgttgtgagttggatagttgtggaaagagtcaaatggctctcctcaagcgtattcaacaaggggctgaaggatgcccagaaggtaccccattgtatgggatctgatctggggcctcggtgcacatgctttacatgtgtttagtcgaggttaaaaaaacgtctaggccccccgaaccacggggacgtggttttcctttgaaaaacacgatgataatatggccacaaccatggacaaagtgctgaatagggaggaaagtctgcaactgatggatctgttgggacttgagaggtctgcatggggtaatatcccacttatgaggaaagcatacctgaagaagtgtaaagagttccatcctgacaaaggtggagatgaagagaagatgaaaaagatgaacacactgtataagaaaatggaagatggtgtaaagtatgctcaccagccagattttggaggtttttgggatgccacagagatacctacttatggtacagatgagtgggaacagtggtggaatgcatttaatgaagagaatttgttttgctctgaggaaatgcctagttctgatgatgaggccacagctgactcccagcacagtactccacccaagaaaaagagaaaagtggaagacccaaaggatttcccctctgaactcttgtccttcttgtctcatgcagtgttctcaaataggaccctggcttgctttgctatctacactactaaggagaaggcagctctcttgtacaagaaaatcatggaaaagtattctgtcacctttatttccaggcacaactcctataatcataatattctctttttcttgacaccccataggcatagggtgagtgcaattaacaactatgctcagaagttgtgtactttctccttcctgatctgtaagggtgtgaataaggagtatctcatgtattcagccctgaccagagacccctttagtgtgattgaagaatccctgcctggtgggctcaaggagcatgatttcaacccagaagaggctgaagaaacaaaacaggtgagctggaagcttgtgactgaatatgcaatggagacaaagtgtgatgatgtcctgctcctcctgggaatgtacctggaatttcagtatagctttgaaatgtgtctgaaatgtatcaaaaaggaacagccttctcattataagtatcatgaaaagcactatgccaatgcagctatatttgcagattctaaaaaccagaaaaccatttgtcagcaagctgttgacacagttctggccaagaaaagagtagactctctccagcttaccagggagcagatgttgacaaataggttcaatgaccttctggacagaatggacataatgtttggctcaactggatctgcagatatagaggagtggatggctggagtggcctggctgcactgtctcctccctaaaatggacagtgtagtctatgacttccttaagtgtatggtctataatatccctaaaaagagatactggttgttcaagggacccattgattcagggaaaactacccttgctgctgcacttctggaactctgtggtgggaaagctctcaatgtcaacctgccacttgatagactcaactttgagctgggggtggcaattgatcagtttttggtagtgtttgaagatgtgaaaggtacaggaggagagtccagggatttgcctagtggccaaggcatcaacaatctggacaacctcagagactacctggatgggtctgtaaaggtcaaccttgaaaaaaagcatctcaacaagaggactcaaatatttccacctggaatagtcactatgaatgaatattcagtgcccaagaccctccaggctagatttgtcaagcaaattgatttcagacctaaagattatctgaaacattgtttggagaggagtgagttcctccttgagaaaaggattattcagtcaggaatagcactgcttcttatgctgatatggtatagaccagtggctgagtttgcccaaagcattcagagtagaatagttgagtggaaagaaaggcttgacaaggagttttctctttcagtatatcaaaagatgaagttcaatgtggctatgggtattggagtgcttgattggttgagaaacagtgatgatgatgatgaagattctcaggaaaatgctgataaaaatgaggatgggggagagaagaatatggaagattctggtcatgaaactggcattgatagtcagagccaggggagtttccaggctccacagagctcccaaagtgtccatgaccacaaccagccttaccatatatgcagaggttttacttgtttcaagaaacctcccactccccctccagaacctgaaacatgagcggccgcgactctagatcataatcagccataccacacctccccctgaacctgaaaaatcaatgcaattattgttgaaataaagcacccagcaatgcctgggaccatgtaaaactgtcctggttctttccaaggtatagagcatagcccacaggctgatatttctggccagggttggttggaggacagccttgtctataggaagagaatgaggtttttgcactataagggcatgcaagtcagtcccgcccctaactccacctggttgcccatcccgcccctaactccgcccagttccgcccattctccgccccatggctgactaattttttttatttatgcagaggcggaggccgcctcggcctctgagctattccagaagtagtgaggaggcttttttggaggcccttaattaaattgacatatctacctaatttgtgtataataaccctgataaatgcttcaataatattgaaaaaggaagagtcctgtataaaaagaaccagctgtggaatgtgtgtcagttagtaggcttatgcaaagtagcccgcccaagagacaggctgaggcccgcccaccatgatagaacaagatggacttcatgctggatctcctgcagcatgggtggaaagactttttggttatgattgggctcagcagaccattggatgttctgatgctgctgtgttcaggcttagtgcacagggtaggccagtgctctttgtgaagactgatctctctggagctttgaatgaactgcaggatgaggctgctaggctttcatggctggccaccacaggtgtcccttgtgctgcagtgttggatgtggttactgaggctgggagggattggctcctcctgggagaagtgccaggtcaggatctgttgagttctcacctggctccagctgaaaaagtctccataatggcagatgctatgagaaggctgcacacattggacccagctacatgcccatttgaccatcaggccaaacacaggattgagagggccagaacaagaatggaggctgggttggtggaccaggatgaccttgatgaggagcatcagggcctggctccagctgaattgtttgccaggctcaaggctagtatgcctgatggggaggatctggtggtaactcatggtgatgcctgtttgcctaacatcatggtggaaaatggaaggttctctggattcattgattgtggaagactgggtgtagctgacaggtatcaggacatagctcttgcaacaagggatattgcagaggagttgggtggagaatgggctgacaggttcctggtcttgtatggcattgctgccccagacagccaaagaattgctttctataggctgttggatgagtttttctaagctcagcacccacaaagctctcaggtcctaagagacactggcacccatatccatgcatcccttgtataaataaagcatccagcaaagctggtaccatgtaaaactgtcttggttgtttccaaggtatagagcatagctcaataggtttttgactttgtcccgcccctctaagtcctgcacacagatactccaatatgacatacagcatgcttgggaactgagtgcccccatgtgggcagagagcaccatgtgccacagtccctgagaagttcttgggaagggtgggcaattgccatgtgtgcctagagaaggttgtttgtaatactgccaagtgccatgtggtgtgatattggctccatgtgccttgtttgtaataacatttccatgtgtcttgggaagaaccatatataagcagagctggtttagtgaaccctcagataggcctagaccatggccagcagtgagaatgtcataacagagttcatgagattcaaggtgaggatggagggaactgtcaatggtcatgagtttgagattgaaggggaaggggagggcagaccctatgagggccacaacacagtcaaattgaaggtgaccaaagggggaccccttccctttgcctgggacatcctgagcccacagtttcagtatggttccaaagtttatgtaaagcaccctgctgacatccctgactacaagaaactgtccttcccagaaggattcaagtgggaaagggtcatgaactttgaggatggaggggttgcaacagtgacccaggacagttctctccaagatggctgtttcatctacaaggtaaaattcattggtgtgaactttccctctgatggcccagtgatgcaaaaaaagaccatgggctgggaagcctcaacagaaaggctgtaccctagagatggagttctcaagggtgagacccacaaagctctaaagctcaaagatgggggccactatctggtggagttcaagagcatctacatggcaaaaaagccagtgcagttgcctggctattactatgtggatgccaagcttgacataacctcacacaatgaagactacactattgtggaacagtatgagaggactgagggaagacatcatctgtttctgtgaattcgcactgcatggacttacctgcctggtggtatcagtcacaggctctgataaggattcagctgttgtataaataaagcatgcagcctagcaggaaccatgttaatctctcttggttgtttccttggaatactcctaagcacattaggtttttagatctgtagaaaagatcaaaggatcttcttgagatcctttttttctgcgcgtaatctgctgcttgcaaacaaaaaaaccaccgctaccagcggtggtttgtttgccggatcaagagctaccaactctttttccgaaggtaactggcttcagcagagcgcagataccaaatactgtccttctagtgtagccgtagttaggccaccacttcaagaactctgtagcaccgcctacatacctcgctctgctaatcctgttaccagtggctgctgccagtggcgataagtcgtgtcttaccgggttggactcaagacgatagttaccggataaggcgcagcggtcgggctgaacggggggttcgtgcacacagcccagcttggagcgaacgacctacaccgaactgagatacctacagcgtgagctatgagaaagcgccacgcttcccgaagggagaaaggcggacaggtatccggtaagcggcagggtcggaacaggagagcgcacgagggagcttccagggggaaacgcctggtatctttatagtcctgtcgggtttcgccacctctgacttgagcgtcgatttttgtgatgctcgtcaggggggcggagcctatggaaaaacgccagcaacgcggcctttttacgg

SEQ ID NO: 608 - DNA, 7213 bp, Artificial Sequence
  pCMV-GFP-IRES-LTAg-WT-dSV (pCzGFP-I-T-dSV or pCzGFP-I-T(WT)-dSV)
ttcctattaatagtaatcaattacggggtcattagttcatagcccatatatggagttccgcgttacataacttacggtaaatggcccgcctggctgaccgcccaacgacccccgcccattgacgtcaataatgacgtatgttcccatagtaacgccaatagggactttccattgacgtcaatgggtggagtatttacggtaaactgcccacttggcagtacatcaagtgtatcatatgccaagtacgccccctattgacgtcaatgacggtaaatggcccgcctggcattatgcccagtacatgaccttatgggactttcctacttggcagtacatctacgtattagtcatcgctattaccatggtgatgcggttttggcagtacatcaatgggcgtggatagcggtttgactcacggggatttccaagtctccaccccattgacgtcaatgggagtttgttttggcaccaaaatcaacgggactttccaaaatgtcgtaacaactccgccccattgacgcaaatgggcggtaggcgtgtacggtgggaggtctatataagcagagctggtttagtgaaccgtcagatccgctagctagaccatggtgagcaagggagaggaactctttacaggtgtggtcccaattctggtggagctggatggagatgtgaatgggcacaaattttctgtcagtggagagggagagggggatgctacctatggcaaactgactctgaagttcatctgcactactggcaagctgcctgtgccatggccaactctggtgacaaccctcacctatggagtccagtgcttttccagatatcctgaccacatgaaacagcatgactttttcaaatctgcaatgcctgagggctatgtgcaagagagaactatctttttcaaggatgatgggaactataagactagggctgaggtgaaatttgaaggagacaccctggtcaataggattgagctcaaggggattgacttcaaggaggatggcaacattctgggccataagctggagtataattacaattcccacaatgtctacattatggctgacaagcagaagaatggcattaaggtcaacttcaagattagacacaacatagaggatggatctgtgcagctggctgaccattaccagcagaatacacctattggggatgggccagtgctgctccctgacaatcactatctgagcacccaatctgctttgtctaaagatcctaatgaaaagagagatcacatggtgctgctggagtttgtaactgctgcaggaattaccttgggtatggatgaactctataaggatccgcccctctccctcccccccccctaacgttactggccgaagccgcttggaataaggccggtgtgcgtttgtctatatgttattttccaccatattgccgtcttttggcaatgtgagggcccggaaacctggccctgtcttcttgacgagcattcctaggggtctttcccctctcgccaaaggaatgcaaggtctgttgaatgtcgtgaaggaagcagttcctctggaagcttcttgaagacaaacaacgtctgtagcgaccctttgcaggcagcggaaccccccacctggcgacaggtgcctctgcggccaaaagccacgtgtataagatacacctgcaaaggcggcacaaccccagtgccacgttgtgagttggatagttgtggaaagagtcaaatggctctcctcaagcgtattcaacaaggggctgaaggatgcccagaaggtaccccattgtatgggatctgatctggggcctcggtgcacatgctttacatgtgtttagtcgaggttaaaaaaacgtctaggccccccgaaccacggggacgtggttttcctttgaaaaacacgatgataatatggccacaaccatggacaaagtgctgaatagggaggaaagtctgcaactgatggatctgttgggacttgagaggtctgcatggggtaatatcccacttatgaggaaagcatacctgaagaagtgtaaagagttccatcctgacaaaggtggagatgaagagaagatgaaaaagatgaacacactgtataagaaaatggaagatggtgtaaagtatgctcaccagccagattttggaggtttttgggatgccacagagatacctacttatggtacagatgagtgggaacagtggtggaatgcatttaatgaagagaatttgttttgctctgaggaaatgcctagttctgatgatgaggccacagctgactcccagcacagtactccacccaagaaaaagagaaaagtggaagacccaaaggatttcccctctgaactcttgtccttcttgtctcatgcagtgttctcaaataggaccctggcttgctttgctatctacactactaaggagaaggcagctctcttgtacaagaaaatcatggaaaagtattctgtcacctttatttccaggcacaactcctataatcataatattctctttttcttgacaccccataggcatagggtgagtgcaattaacaactatgctcagaagttgtgtactttctccttcctgatctgtaagggtgtgaataaggagtatctcatgtattcagccctgaccagagacccctttagtgtgattgaagaatccctgcctggtgggctcaaggagcatgatttcaacccagaagaggctgaagaaacaaaacaggtgagctggaagcttgtgactgaatatgcaatggagacaaagtgtgatgatgtcctgctcctcctgggaatgtacctggaatttcagtatagctttgaaatgtgtctgaaatgtatcaaaaaggaacagccttctcattataagtatcatgaaaagcactatgccaatgcagctatatttgcagattctaaaaaccagaaaaccatttgtcagcaagctgttgacacagttctggccaagaaaagagtagactctctccagcttaccagggagcagatgttgacaaataggttcaatgaccttctggacagaatggacataatgtttggctcaactggatctgcagatatagaggagtggatggctggagtggcctggctgcactgtctcctccctaaaatggacagtgtagtctatgacttccttaagtgtatggtctataatatccctaaaaagagatactggttgttcaagggacccattgattcagggaaaactacccttgctgctgcacttctggaactctgtggtgggaaagctctcaatgtcaacctgccacttgatagactcaactttgagctgggggtggcaattgatcagtttttggtagtgtttgaagatgtgaaaggtacaggaggagagtccagggatttgcctagtggccaaggcatcaacaatctggacaacctcagagactacctggatgggtctgtaaaggtcaaccttgaaaaaaagcatctcaacaagaggactcaaatatttccacctggaatagtcactatgaatgaatattcagtgcccaagaccctccaggctagatttgtcaagcaaattgatttcagacctaaagattatctgaaacattgtttggagaggagtgagttcctccttgagaaaaggattattcagtcaggaatagcactgcttcttatgctgatatggtatagaccagtggctgagtttgcccaaagcattcagagtagaatagttgagtggaaagaaaggcttgacaaggagttttctctttcagtatatcaaaagatgaagttcaatgtggctatgggtattggagtgcttgattggttgagaaacagtgatgatgatgatgaagattctcaggaaaatgctgataaaaatgaggatgggggagagaagaatatggaagattctggtcatgaaactggcattgatagtcagagccaggggagtttccaggctccacagagctcccaaagtgtccatgaccacaaccagccttaccatatatgcagaggttttacttgtttcaagaaacctcccactccccctccagaacctgaaacatgagcggccgcgactctagatcataatcagccataccacacctccccctgaacctgaaaaatcaatgcaattattgttgaaataaagcacccagcaatgcctgggaccatgtaaaactgtcctggttctttccaaggtatagagcatagcccacaggctgatatttctggccagggttggttggaggacagccttgtctataggaagagaatgaggtttttgcactataagggcatgcaagtcagtcccgcccctaactccacctggttaggaggggaggaggattaattaaattgacatatctacctaatttgtgtataataaccctgataaatgcttcaataatattgaaaaaggaagagtcctgtataaaaagaaccagctgtggaatgtgtgtcagttagtaggcttatgcaaagtagcccgcccaagagacaggctgaggcccgcccaccatgatagaacaagatggacttcatgctggatctcctgcagcatgggtggaaagactttttggttatgattgggctcagcagaccattggatgttctgatgctgctgtgttcaggcttagtgcacagggtaggccagtgctctttgtgaagactgatctctctggagctttgaatgaactgcaggatgaggctgctaggctttcatggctggccaccacaggtgtcccttgtgctgcagtgttggatgtggttactgaggctgggagggattggctcctcctgggagaagtgccaggtcaggatctgttgagttctcacctggctccagctgaaaaagtctccataatggcagatgctatgagaaggctgcacacattggacccagctacatgcccatttgaccatcaggccaaacacaggattgagagggccagaacaagaatggaggctgggttggtggaccaggatgaccttgatgaggagcatcagggcctggctccagctgaattgtttgccaggctcaaggctagtatgcctgatggggaggatctggtggtaactcatggtgatgcctgtttgcctaacatcatggtggaaaatggaaggttctctggattcattgattgtggaagactgggtgtagctgacaggtatcaggacatagctcttgcaacaagggatattgcagaggagttgggtggagaatgggctgacaggttcctggtcttgtatggcattgctgccccagacagccaaagaattgctttctataggctgttggatgagtttttctaagctcagcacccacaaagctctcaggtcctaagagacactggcacccatatccatgcatcccttgtataaataaagcatccagcaaagctggtaccatgtaaaactgtcttggttgtttccaaggtatagagcatagctcaataggtttttgactttgtcccgcccctctaagtcctgcacacagatactccaatatgacatacagcatgcttgggaactgagtgcccccatgtgggcagagagcaccatgtgccacagtccctgagaagttcttgggaagggtgggcaattgccatgtgtgcctagagaaggttgtttgtaatactgccaagtgccatgtggtgtgatattggctccatgtgccttgtttgtaataacatttccatgtgtcttgggaagaaccatatataagcagagctggtttagtgaaccctcagataggcctagaccatggccagcagtgagaatgtcataacagagttcatgagattcaaggtgaggatggagggaactgtcaatggtcatgagtttgagattgaaggggaaggggagggcagaccctatgagggccacaacacagtcaaattgaaggtgaccaaagggggaccccttccctttgcctgggacatcctgagcccacagtttcagtatggttccaaagtttatgtaaagcaccctgctgacatccctgactacaagaaactgtccttcccagaaggattcaagtgggaaagggtcatgaactttgaggatggaggggttgcaacagtgacccaggacagttctctccaagatggctgtttcatctacaaggtaaaattcattggtgtgaactttccctctgatggcccagtgatgcaaaaaaagaccatgggctgggaagcctcaacagaaaggctgtaccctagagatggagttctcaagggtgagacccacaaagctctaaagctcaaagatgggggccactatctggtggagttcaagagcatctacatggcaaaaaagccagtgcagttgcctggctattactatgtggatgccaagcttgacataacctcacacaatgaagactacactattgtggaacagtatgagaggactgagggaagacatcatctgtttctgtgaattcgcactgcatggacttacctgcctggtggtatcagtcacaggctctgataaggattcagctgttgtataaataaagcatgcagcctagcaggaaccatgttaatctctcttggttgtttccttggaatactcctaagcacattaggtttttagatctgtagaaaagatcaaaggatcttcttgagatcctttttttctgcgcgtaatctgctgcttgcaaacaaaaaaaccaccgctaccagcggtggtttgtttgccggatcaagagctaccaactctttttccgaaggtaactggcttcagcagagcgcagataccaaatactgtccttctagtgtagccgtagttaggccaccacttcaagaactctgtagcaccgcctacatacctcgctctgctaatcctgttaccagtggctgctgccagtggcgataagtcgtgtcttaccgggttggactcaagacgatagttaccggataaggcgcagcggtcgggctgaacggggggttcgtgcacacagcccagcttggagcgaacgacctacaccgaactgagatacctacagcgtgagctatgagaaagcgccacgcttcccgaagggagaaaggcggacaggtatccggtaagcggcagggtcggaacaggagagcgcacgagggagcttccagggggaaacgcctggtatctttatagtcctgtcgggtttcgccacctctgacttgagcgtcgatttttgtgatgctcgtcaggggggcggagcctatggaaaaacgccagcaacgcggcctttttacgg

SEQ ID NO: 609 - DNA, 4613 bp, Artificial Sequence
  pCzGFP-deltaI-T-BB3
ttcctattaatagtaatcaattacggggtcattagttcatagcccatatatggagttccgcgttacataacttacggtaaatggcccgcctggctgaccgcccaacgacccccgcccattgacgtcaataatgacgtatgttcccatagtaacgccaatagggactttccattgacgtcaatgggtggagtatttacggtaaactgcccacttggcagtacatcaagtgtatcatatgccaagtacgccccctattgacgtcaatgacggtaaatggcccgcctggcattatgcccagtacatgaccttatgggactttcctacttggcagtacatctacgtattagtcatcgctattaccatggtgatgcggttttggcagtacatcaatgggcgtggatagcggtttgactcacggggatttccaagtctccaccccattgacgtcaatgggagtttgttttggcaccaaaatcaacgggactttccaaaatgtcgtaacaactccgccccattgacgcaaatgggcggtaggcgtgtacggtgggaggtctatataagcagagctggtttagtgaaccgtcagatccgctagctagaccatggtgagcaagggagaggaactctttacaggtgtggtcccaattctggtggagctggatggagatgtgaatgggcacaaattttctgtcagtggagagggagagggggatgctacctatggcaaactgactctgaagttcatctgcactactggcaagctgcctgtgccatggccaactctggtgacaaccctcacctatggagtccagtgcttttccagatatcctgaccacatgaaacagcatgactttttcaaatctgcaatgcctgagggctatgtgcaagagagaactatctttttcaaggatgatgggaactataagactagggctgaggtgaaatttgaaggagacaccctggtcaataggattgagctcaaggggattgacttcaaggaggatggcaacattctgggccataagctggagtataattacaattcccacaatgtctacattatggctgacaagcagaagaatggcattaaggtcaacttcaagattagacacaacatagaggatggatctgtgcagctggctgaccattaccagcagaatacacctattggggatgggccagtgctgctccctgacaatcactatctgagcacccaatctgctttgtctaaagatcctaatgaaaagagagatcacatggtgctgctggagtttgtaactgctgcaggaattaccttgggtatggatgaactctataagtaaactctagatcataatcagccataccacacctccccctgaacctgaaaaatcaatgcaattattgttgaaataaagcacccagcaatgcctgggaccatgtaaaactgtcctggttctttccaaggtatagagcatagcccacaggctgatatttctggccagggttggttggaggacagccttgtctataggaagagaatgaggtttttgcactataagggcatgcaagtcagtcccgcccctaactccacctggttgcccatcccgcccctaactccgcccagttccgcccattctccgccccatggctgactaattttttttatttatgcagaggcggaggccgcctcggcctctgagctattccagaagtagtgaggaggcttttttggaggcccttaattaaattgacatatctacctaatttgtgtataataaccctgataaatgcttcaataatattgaaaaaggaagagtcctgtataaaaagaaccagctgtggaatgtgtgtcagttagtaggcttatgcaaagtagcccgcccaagagacaggctgaggcccgcccaccatgatagaacaagatggacttcatgctggatctcctgcagcatgggtggaaagactttttggttatgattgggctcagcagaccattggatgttctgatgctgctgtgttcaggcttagtgcacagggtaggccagtgctctttgtgaagactgatctctctggagctttgaatgaactgcaggatgaggctgctaggctttcatggctggccaccacaggtgtcccttgtgctgcagtgttggatgtggttactgaggctgggagggattggctcctcctgggagaagtgccaggtcaggatctgttgagttctcacctggctccagctgaaaaagtctccataatggcagatgctatgagaaggctgcacacattggacccagctacatgcccatttgaccatcaggccaaacacaggattgagagggccagaacaagaatggaggctgggttggtggaccaggatgaccttgatgaggagcatcagggcctggctccagctgaattgtttgccaggctcaaggctagtatgcctgatggggaggatctggtggtaactcatggtgatgcctgtttgcctaacatcatggtggaaaatggaaggttctctggattcattgattgtggaagactgggtgtagctgacaggtatcaggacatagctcttgcaacaagggatattgcagaggagttgggtggagaatgggctgacaggttcctggtcttgtatggcattgctgccccagacagccaaagaattgctttctataggctgttggatgagtttttctaagctcagcacccacaaagctctcaggtcctaagagacactggcacccatatccatgcatcccttgtataaataaagcatccagcaaagctggtaccatgtaaaactgtcttggttgtttccaaggtatagagcatagctcaataggtttttgactttgtcccgcccctctaagtcctgcacacagatactccaatatgacatacagcatgcttgggaactgagtgcccccatgtgggcagagagcaccatgtgccacagtccctgagaagttcttgggaagggtgggcaattgccatgtgtgcctagagaaggttgtttgtaatactgccaagtgccatgtggtgtgatattggctccatgtgccttgtttgtaataacatttccatgtgtcttgggaagaaccatatataagcagagctggtttagtgaaccctcagataggcctagaccatggccagcagtgagaatgtcataacagagttcatgagattcaaggtgaggatggagggaactgtcaatggtcatgagtttgagattgaaggggaaggggagggcagaccctatgagggccacaacacagtcaaattgaaggtgaccaaagggggaccccttccctttgcctgggacatcctgagcccacagtttcagtatggttccaaagtttatgtaaagcaccctgctgacatccctgactacaagaaactgtccttcccagaaggattcaagtgggaaagggtcatgaactttgaggatggaggggttgcaacagtgacccaggacagttctctccaagatggctgtttcatctacaaggtaaaattcattggtgtgaactttccctctgatggcccagtgatgcaaaaaaagaccatgggctgggaagcctcaacagaaaggctgtaccctagagatggagttctcaagggtgagacccacaaagctctaaagctcaaagatgggggccactatctggtggagttcaagagcatctacatggcaaaaaagccagtgcagttgcctggctattactatgtggatgccaagcttgacataacctcacacaatgaagactacactattgtggaacagtatgagaggactgagggaagacatcatctgtttctgtgaattcgcactgcatggacttacctgcctggtggtatcagtcacaggctctgataaggattcagctgttgtataaataaagcatgcagcctagcaggaaccatgttaatctctcttggttgtttccttggaatactcctaagcacattaggtttttagatctgtagaaaagatcaaaggatcttcttgagatcctttttttctgcgcgtaatctgctgcttgcaaacaaaaaaaccaccgctaccagcggtggtttgtttgccggatcaagagctaccaactctttttccgaaggtaactggcttcagcagagcgcagataccaaatactgtccttctagtgtagccgtagttaggccaccacttcaagaactctgtagcaccgcctacatacctcgctctgctaatcctgttaccagtggctgctgccagtggcgataagtcgtgtcttaccgggttggactcaagacgatagttaccggataaggcgcagcggtcgggctgaacggggggttcgtgcacacagcccagcttggagcgaacgacctacaccgaactgagatacctacagcgtgagctatgagaaagcgccacgcttcccgaagggagaaaggcggacaggtatccggtaagcggcagggtcggaacaggagagcgcacgagggagcttccagggggaaacgcctggtatctttatagtcctgtcgggtttcgccacctctgacttgagcgtcgatttttgtgatgctcgtcaggggggcggagcctatggaaaaacgccagcaacgcggcctttttacgg

SEQ ID NO: 610 - DNA, 7343 bp, Artificial Sequence
  pCzGFP-I-nativeTAg-BB3
ttcctattaatagtaatcaattacggggtcattagttcatagcccatatatggagttccgcgttacataacttacggtaaatggcccgcctggctgaccgcccaacgacccccgcccattgacgtcaataatgacgtatgttcccatagtaacgccaatagggactttccattgacgtcaatgggtggagtatttacggtaaactgcccacttggcagtacatcaagtgtatcatatgccaagtacgccccctattgacgtcaatgacggtaaatggcccgcctggcattatgcccagtacatgaccttatgggactttcctacttggcagtacatctacgtattagtcatcgctattaccatggtgatgcggttttggcagtacatcaatgggcgtggatagcggtttgactcacggggatttccaagtctccaccccattgacgtcaatgggagtttgttttggcaccaaaatcaacgggactttccaaaatgtcgtaacaactccgccccattgacgcaaatgggcggtaggcgtgtacggtgggaggtctatataagcagagctggtttagtgaaccgtcagatccgctagctagaccatggtgagcaagggagaggaactctttacaggtgtggtcccaattctggtggagctggatggagatgtgaatgggcacaaattttctgtcagtggagagggagagggggatgctacctatggcaaactgactctgaagttcatctgcactactggcaagctgcctgtgccatggccaactctggtgacaaccctcacctatggagtccagtgcttttccagatatcctgaccacatgaaacagcatgactttttcaaatctgcaatgcctgagggctatgtgcaagagagaactatctttttcaaggatgatgggaactataagactagggctgaggtgaaatttgaaggagacaccctggtcaataggattgagctcaaggggattgacttcaaggaggatggcaacattctgggccataagctggagtataattacaattcccacaatgtctacattatggctgacaagcagaagaatggcattaaggtcaacttcaagattagacacaacatagaggatggatctgtgcagctggctgaccattaccagcagaatacacctattggggatgggccagtgctgctccctgacaatcactatctgagcacccaatctgctttgtctaaagatcctaatgaaaagagagatcacatggtgctgctggagtttgtaactgctgcaggaattaccttgggtatggatgaactctataagtaaggatccgcccctctccctcccccccccctaacgttactggccgaagccgcttggaataaggccggtgtgcgtttgtctatatgttattttccaccatattgccgtcttttggcaatgtgagggcccggaaacctggccctgtcttcttgacgagcattcctaggggtctttcccctctcgccaaaggaatgcaaggtctgttgaatgtcgtgaaggaagcagttcctctggaagcttcttgaagacaaacaacgtctgtagcgaccctttgcaggcagcggaaccccccacctggcgacaggtgcctctgcggccaaaagccacgtgtataagatacacctgcaaaggcggcacaaccccagtgccacgttgtgagttggatagttgtggaaagagtcaaatggctctcctcaagcgtattcaacaaggggctgaaggatgcccagaaggtaccccattgtatgggatctgatctggggcctcggtgcacatgctttacatgtgtttagtcgaggttaaaaaaacgtctaggccccccgaaccacggggacgtggttttcctttgaaaaacacgatgataatatggccacaaccatggataaagttttaaacagagaggaatctttgcagctaatggaccttctaggtcttgaaaggagtgcctgggggaatattcctctgatgagaaaggcatatttaaaaaaatgcaaggagtttcatcctgataaaggaggagatgaagaaaaaatgaagaaaatgaatactctgtacaagaaaatggaagatggagtaaaatatgctcatcaacctgactttggaggcttctgggatgcaactgagattccaacctatggaactgatgaatgggagcagtggtggaatgcctttaatgaggaaaacctgttttgctcagaagaaatgccatctagtgatgatgaggctactgctgactctcaacattctactcctccaaaaaagaagagaaaggtagaagaccccaaggactttccttcagaattgctaagttttttgagtcatgctgtgtttagtaatagaactcttgcttgctttgctatttacaccacaaaggaaaaagctgcactgctatacaagaaaattatggaaaaatattctgtaacctttataagtaggcataacagttataatcataacatactgttttttcttactccacacaggcatagagtgtctgctattaataactatgctcaaaaattgtgtacctttagctttttaatttgtaaaggggttaataaggaatatttgatgtatagtgccttgactagagatccattttctgttattgaggaaagtttgccaggtgggttaaaggagcatgattttaatccagaagaagcagaggaaactaaacaagtgtcctggaagcttgtaacagagtatgcaatggaaacaaaatgtgatgatgtgttgttattgcttgggatgtacttggaatttcagtacagttttgaaatgtgtttaaaatgtattaaaaaagaacagcccagccactataagtaccatgaaaagcattatgcaaatgctgctatatttgctgacagcaaaaaccaaaaaaccatatgccaacaggctgttgatactgttttagctaaaaagcgggttgatagcctacaattaactagagaacaaatgttaacaaacagatttaatgatcttttggataggatggatataatgtttggttctacaggctctgctgacatagaagaatggatggctggagttgcttggctacactgtttgttgcccaaaatggattcagtggtgtatgactttttaaaatgcatggtgtacaacattcctaaaaaaagatactggctgtttaaaggaccaattgatagtggtaaaactacattagcagctgctttgcttgaattatgtggggggaaagctttaaatgttaatttgcccttggacaggctgaactttgagctaggagtagctattgaccagtttttagtagtttttgaggatgtaaagggcactggaggggagtccagagatttgccttcaggtcagggaattaataacctggacaatttaagggattatttggatggcagtgttaaggtaaacttagaaaagaaacacctaaataaaagaactcaaatatttccccctggaatagtcaccatgaatgagtacagtgtgcctaaaacactgcaggccagatttgtaaaacaaatagattttaggcccaaagattatttaaagcattgcctggaacgcagtgagtttttgttagaaaagagaataattcaaagtggcattgctttgcttcttatgttaatttggtacagacctgtggctgagtttgctcaaagtattcagagcagaattgtggagtggaaagagagattggacaaagagtttagtttgtcagtgtatcaaaaaatgaagtttaatgtggctatgggaattggagttttagattggctaagaaacagtgatgatgatgatgaagacagccaggaaaatgctgataaaaatgaagatggtggggagaagaacatggaagactcagggcatgaaacaggcattgattcacagtcccaaggctcatttcaggcccctcagtcctcacagtctgttcatgatcataatcagccataccacatttgtagaggttttacttgctttaaaaaacctcccacacctccccctgaacctgaaacataagcggccgcgactctagatcataatcagccataccacacctccccctgaacctgaaaaatcaatgcaattattgttgaaataaagcacccagcaatgcctgggaccatgtaaaactgtcctggttctttccaaggtatagagcatagcccacaggctgatatttctggccagggttggttggaggacagccttgtctataggaagagaatgaggtttttgcactataagggcatgcaagtcagtcccgcccctaactccacctggttgcccatcccgcccctaactccgcccagttccgcccattctccgccccatggctgactaattttttttatttatgcagaggcggaggccgcctcggcctctgagctattccagaagtagtgaggaggcttttttggaggcccttaattaaattgacatatctacctaatttgtgtataataaccctgataaatgcttcaataatattgaaaaaggaagagtcctgtataaaaagaaccagctgtggaatgtgtgtcagttagtaggcttatgcaaagtagcccgcccaagagacaggctgaggcccgcccaccatgatagaacaagatggacttcatgctggatctcctgcagcatgggtggaaagactttttggttatgattgggctcagcagaccattggatgttctgatgctgctgtgttcaggcttagtgcacagggtaggccagtgctctttgtgaagactgatctctctggagctttgaatgaactgcaggatgaggctgctaggctttcatggctggccaccacaggtgtcccttgtgctgcagtgttggatgtggttactgaggctgggagggattggctcctcctgggagaagtgccaggtcaggatctgttgagttctcacctggctccagctgaaaaagtctccataatggcagatgctatgagaaggctgcacacattggacccagctacatgcccatttgaccatcaggccaaacacaggattgagagggccagaacaagaatggaggctgggttggtggaccaggatgaccttgatgaggagcatcagggcctggctccagctgaattgtttgccaggctcaaggctagtatgcctgatggggaggatctggtggtaactcatggtgatgcctgtttgcctaacatcatggtggaaaatggaaggttctctggattcattgattgtggaagactgggtgtagctgacaggtatcaggacatagctcttgcaacaagggatattgcagaggagttgggtggagaatgggctgacaggttcctggtcttgtatggcattgctgccccagacagccaaagaattgctttctataggctgttggatgagtttttctaagctcagcacccacaaagctctcaggtcctaagagacactggcacccatatccatgcatcccttgtataaataaagcatccagcaaagctggtaccatgtaaaactgtcttggttgtttccaaggtatagagcatagctcaataggtttttgactttgtcccgcccctctaagtcctgcacacagatactccaatatgacatacagcatgcttgggaactgagtgcccccatgtgggcagagagcaccatgtgccacagtccctgagaagttcttgggaagggtgggcaattgccatgtgtgcctagagaaggttgtttgtaatactgccaagtgccatgtggtgtgatattggctccatgtgccttgtttgtaataacatttccatgtgtcttgggaagaaccatatataagcagagctggtttagtgaaccctcagataggcctagaccatggccagcagtgagaatgtcataacagagttcatgagattcaaggtgaggatggagggaactgtcaatggtcatgagtttgagattgaaggggaaggggagggcagaccctatgagggccacaacacagtcaaattgaaggtgaccaaagggggaccccttccctttgcctgggacatcctgagcccacagtttcagtatggttccaaagtttatgtaaagcaccctgctgacatccctgactacaagaaactgtccttcccagaaggattcaagtgggaaagggtcatgaactttgaggatggaggggttgcaacagtgacccaggacagttctctccaagatggctgtttcatctacaaggtaaaattcattggtgtgaactttccctctgatggcccagtgatgcaaaaaaagaccatgggctgggaagcctcaacagaaaggctgtaccctagagatggagttctcaagggtgagacccacaaagctctaaagctcaaagatgggggccactatctggtggagttcaagagcatctacatggcaaaaaagccagtgcagttgcctggctattactatgtggatgccaagcttgacataacctcacacaatgaagactacactattgtggaacagtatgagaggactgagggaagacatcatctgtttctgtgaattcgcactgcatggacttacctgcctggtggtatcagtcacaggctctgataaggattcagctgttgtataaataaagcatgcagcctagcaggaaccatgttaatctctcttggttgtttccttggaatactcctaagcacattaggtttttagatctgtagaaaagatcaaaggatcttcttgagatcctttttttctgcgcgtaatctgctgcttgcaaacaaaaaaaccaccgctaccagcggtggtttgtttgccggatcaagagctaccaactctttttccgaaggtaactggcttcagcagagcgcagataccaaatactgtccttctagtgtagccgtagttaggccaccacttcaagaactctgtagcaccgcctacatacctcgctctgctaatcctgttaccagtggctgctgccagtggcgataagtcgtgtcttaccgggttggactcaagacgatagttaccggataaggcgcagcggtcgggctgaacggggggttcgtgcacacagcccagcttggagcgaacgacctacaccgaactgagatacctacagcgtgagctatgagaaagcgccacgcttcccgaagggagaaaggcggacaggtatccggtaagcggcagggtcggaacaggagagcgcacgagggagcttccagggggaaacgcctggtatctttatagtcctgtcgggtttcgccacctctgacttgagcgtcgatttttgtgatgctcgtcaggggggcggagcctatggaaaaacgccagcaacgcggcctttttacgg

SEQ ID NO: 611 - DNA, 7322 bp, Artificial Sequence
  pC-mKate2-I-T-BB3
ttcctattaatagtaatcaattacggggtcattagttcatagcccatatatggagttccgcgttacataacttacggtaaatggcccgcctggctgaccgcccaacgacccccgcccattgacgtcaataatgacgtatgttcccatagtaacgccaatagggactttccattgacgtcaatgggtggagtatttacggtaaactgcccacttggcagtacatcaagtgtatcatatgccaagtacgccccctattgacgtcaatgacggtaaatggcccgcctggcattatgcccagtacatgaccttatgggactttcctacttggcagtacatctacgtattagtcatcgctattaccatggtgatgcggttttggcagtacatcaatgggcgtggatagcggtttgactcacggggatttccaagtctccaccccattgacgtcaatgggagtttgttttggcaccaaaatcaacgggactttccaaaatgtcgtaacaactccgccccattgacgcaaatgggcggtaggcgtgtacggtgggaggtctatataagcagagctggtttagtgaaccgtcagatccgctagcgccaccatggtctctgaactgatcaaagaaaatatgcacatgaaactgtatatggaaggcacagtcaataatcaccacttcaaatgcacctctgagggagaagggaagccatatgaggggacacagactatgaggatcaaagcagtggaaggaggaccactgccttttgcatttgacattctggccaccagcttcatgtatgggtccaagaccttcatcaaccacactcagggcatccctgacttctttaaacagtcattccctgagggcttcacctgggaaagagtgaccacatatgaggatggaggtgtcctgactgccacacaggacacaagcctgcaggatggctgcctgatctataatgtgaagattaggggagtcaacttcccatctaatggccctgtgatgcagaagaaaactctgggctgggaggctagtactgaaaccctgtatcctgcagatggaggactggagggaagggcagatatggctctgaagctggtgggagggggacatctgatctgtaacctgaaaactacctataggtctaagaaacctgccaagaatctgaaaatgccaggcgtgtactatgtggacaggagactggagaggattaaggaagctgataaagagacatatgtggaacagcatgaagtggctgttgcaagatattgtgacctgccatcaaaactgggacacagataaggatccgcccctctccctcccccccccctaacgttactggccgaagccgcttggaataaggccggtgtgcgtttgtctatatgttattttccaccatattgccgtcttttggcaatgtgagggcccggaaacctggccctgtcttcttgacgagcattcctaggggtctttcccctctcgccaaaggaatgcaaggtctgttgaatgtcgtgaaggaagcagttcctctggaagcttcttgaagacaaacaacgtctgtagcgaccctttgcaggcagcggaaccccccacctggcgacaggtgcctctgcggccaaaagccacgtgtataagatacacctgcaaaggcggcacaaccccagtgccacgttgtgagttggatagttgtggaaagagtcaaatggctctcctcaagcgtattcaacaaggggctgaaggatgcccagaaggtaccccattgtatgggatctgatctggggcctcggtgcacatgctttacatgtgtttagtcgaggttaaaaaaacgtctaggccccccgaaccacggggacgtggttttcctttgaaaaacacgatgataatatggccacaaccatggacaaagtgctgaatagggaggaaagtctgcaactgatggatctgttgggacttgagaggtctgcatggggtaatatcccacttatgaggaaagcatacctgaagaagtgtaaagagttccatcctgacaaaggtggagatgaagagaagatgaaaaagatgaacacactgtataagaaaatggaagatggtgtaaagtatgctcaccagccagattttggaggtttttgggatgccacagagatacctacttatggtacagatgagtgggaacagtggtggaatgcatttaatgaagagaatttgttttgctctgaggaaatgcctagttctgatgatgaggccacagctgactcccagcacagtactccacccaagaaaaagagaaaagtggaagacccaaaggatttcccctctgaactcttgtccttcttgtctcatgcagtgttctcaaataggaccctggcttgctttgctatctacactactaaggagaaggcagctctcttgtacaagaaaatcatggaaaagtattctgtcacctttatttccaggcacaactcctataatcataatattctctttttcttgacaccccataggcatagggtgagtgcaattaacaactatgctcagaagttgtgtactttctccttcctgatctgtaagggtgtgaataaggagtatctcatgtattcagccctgaccagagacccctttagtgtgattgaagaatccctgcctggtgggctcaaggagcatgatttcaacccagaagaggctgaagaaacaaaacaggtgagctggaagcttgtgactgaatatgcaatggagacaaagtgtgatgatgtcctgctcctcctgggaatgtacctggaatttcagtatagctttgaaatgtgtctgaaatgtatcaaaaaggaacagccttctcattataagtatcatgaaaagcactatgccaatgcagctatatttgcagattctaaaaaccagaaaaccatttgtcagcaagctgttgacacagttctggccaagaaaagagtagactctctccagcttaccagggagcagatgttgacaaataggttcaatgaccttctggacagaatggacataatgtttggctcaactggatctgcagatatagaggagtggatggctggagtggcctggctgcactgtctcctccctaaaatggacagtgtagtctatgacttccttaagtgtatggtctataatatccctaaaaagagatactggttgttcaagggacccattgattcagggaaaactacccttgctgctgcacttctggaactctgtggtgggaaagctctcaatgtcaacctgccacttgatagactcaactttgagctgggggtggcaattgatcagtttttggtagtgtttgaagatgtgaaaggtacaggaggagagtccagggatttgcctagtggccaaggcatcaacaatctggacaacctcagagactacctggatgggtctgtaaaggtcaaccttgaaaaaaagcatctcaacaagaggactcaaatatttccacctggaatagtcactatgaatgaatattcagtgcccaagaccctccaggctagatttgtcaagcaaattgatttcagacctaaagattatctgaaacattgtttggagaggagtgagttcctccttgagaaaaggattattcagtcaggaatagcactgcttcttatgctgatatggtatagaccagtggctgagtttgcccaaagcattcagagtagaatagttgagtggaaagaaaggcttgacaaggagttttctctttcagtatatcaaaagatgaagttcaatgtggctatgggtattggagtgcttgattggttgagaaacagtgatgatgatgatgaagattctcaggaaaatgctgataaaaatgaggatgggggagagaagaatatggaagattctggtcatgaaactggcattgatagtcagagccaggggagtttccaggctccacagagctcccaaagtgtccatgaccacaaccagccttaccatatatgcagaggttttacttgtttcaagaaacctcccactccccctccagaacctgaaacatgagcggccgcgactctagatcataatcagccataccacacctccccctgaacctgaaaaatcaatgcaattattgttgaaataaagcacccagcaatgcctgggaccatgtaaaactgtcctggttctttccaaggtatagagcatagcccacaggctgatatttctggccagggttggttggaggacagccttgtctataggaagagaatgaggtttttgcactataagggcatgcaagtcagtcccgcccctaactccacctggttgcccatcccgcccctaactccgcccagttccgcccattctccgccccatggctgactaattttttttatttatgcagaggcggaggccgcctcggcctctgagctattccagaagtagtgaggaggcttttttggaggcccttaattaaattgacatatctacctaatttgtgtataataaccctgataaatgcttcaataatattgaaaaaggaagagtcctgtataaaaagaaccagctgtggaatgtgtgtcagttagtaggcttatgcaaagtagcccgcccaagagacaggctgaggcccgcccaccatgatagaacaagatggacttcatgctggatctcctgcagcatgggtggaaagactttttggttatgattgggctcagcagaccattggatgttctgatgctgctgtgttcaggcttagtgcacagggtaggccagtgctctttgtgaagactgatctctctggagctttgaatgaactgcaggatgaggctgctaggctttcatggctggccaccacaggtgtcccttgtgctgcagtgttggatgtggttactgaggctgggagggattggctcctcctgggagaagtgccaggtcaggatctgttgagttctcacctggctccagctgaaaaagtctccataatggcagatgctatgagaaggctgcacacattggacccagctacatgcccatttgaccatcaggccaaacacaggattgagagggccagaacaagaatggaggctgggttggtggaccaggatgaccttgatgaggagcatcagggcctggctccagctgaattgtttgccaggctcaaggctagtatgcctgatggggaggatctggtggtaactcatggtgatgcctgtttgcctaacatcatggtggaaaatggaaggttctctggattcattgattgtggaagactgggtgtagctgacaggtatcaggacatagctcttgcaacaagggatattgcagaggagttgggtggagaatgggctgacaggttcctggtcttgtatggcattgctgccccagacagccaaagaattgctttctataggctgttggatgagtttttctaagctcagcacccacaaagctctcaggtcctaagagacactggcacccatatccatgcatcccttgtataaataaagcatccagcaaagctggtaccatgtaaaactgtcttggttgtttccaaggtatagagcatagctcaataggtttttgactttgtcccgcccctctaagtcctgcacacagatactccaatatgacatacagcatgcttgggaactgagtgcccccatgtgggcagagagcaccatgtgccacagtccctgagaagttcttgggaagggtgggcaattgccatgtgtgcctagagaaggttgtttgtaatactgccaagtgccatgtggtgtgatattggctccatgtgccttgtttgtaataacatttccatgtgtcttgggaagaaccatatataagcagagctggtttagtgaaccctcagataggcctagaccatggccagcagtgagaatgtcataacagagttcatgagattcaaggtgaggatggagggaactgtcaatggtcatgagtttgagattgaaggggaaggggagggcagaccctatgagggccacaacacagtcaaattgaaggtgaccaaagggggaccccttccctttgcctgggacatcctgagcccacagtttcagtatggttccaaagtttatgtaaagcaccctgctgacatccctgactacaagaaactgtccttcccagaaggattcaagtgggaaagggtcatgaactttgaggatggaggggttgcaacagtgacccaggacagttctctccaagatggctgtttcatctacaaggtaaaattcattggtgtgaactttccctctgatggcccagtgatgcaaaaaaagaccatgggctgggaagcctcaacagaaaggctgtaccctagagatggagttctcaagggtgagacccacaaagctctaaagctcaaagatgggggccactatctggtggagttcaagagcatctacatggcaaaaaagccagtgcagttgcctggctattactatgtggatgccaagcttgacataacctcacacaatgaagactacactattgtggaacagtatgagaggactgagggaagacatcatctgtttctgtgaattcgcactgcatggacttacctgcctggtggtatcagtcacaggctctgataaggattcagctgttgtataaataaagcatgcagcctagcaggaaccatgttaatctctcttggttgtttccttggaatactcctaagcacattaggtttttagatctgtagaaaagatcaaaggatcttcttgagatcctttttttctgcgcgtaatctgctgcttgcaaacaaaaaaaccaccgctaccagcggtggtttgtttgccggatcaagagctaccaactctttttccgaaggtaactggcttcagcagagcgcagataccaaatactgtccttctagtgtagccgtagttaggccaccacttcaagaactctgtagcaccgcctacatacctcgctctgctaatcctgttaccagtggctgctgccagtggcgataagtcgtgtcttaccgggttggactcaagacgatagttaccggataaggcgcagcggtcgggctgaacggggggttcgtgcacacagcccagcttggagcgaacgacctacaccgaactgagatacctacagcgtgagctatgagaaagcgccacgcttcccgaagggagaaaggcggacaggtatccggtaagcggcagggtcggaacaggagagcgcacgagggagcttccagggggaaacgcctggtatctttatagtcctgtcgggtttcgccacctctgacttgagcgtcgatttttgtgatgctcgtcaggggggcggagcctatggaaaaacgccagcaacgcggcctttttacgg

SEQ ID NO: 612 - DNA, 8277 bp, Artificial Sequence
  pC-Luc-I-T-BB3
ttcctattaatagtaatcaattacggggtcattagttcatagcccatatatggagttccgcgttacataacttacggtaaatggcccgcctggctgaccgcccaacgacccccgcccattgacgtcaataatgacgtatgttcccatagtaacgccaatagggactttccattgacgtcaatgggtggagtatttacggtaaactgcccacttggcagtacatcaagtgtatcatatgccaagtacgccccctattgacgtcaatgacggtaaatggcccgcctggcattatgcccagtacatgaccttatgggactttcctacttggcagtacatctacgtattagtcatcgctattaccatggtgatgcggttttggcagtacatcaatgggcgtggatagcggtttgactcacggggatttccaagtctccaccccattgacgtcaatgggagtttgttttggcaccaaaatcaacgggactttccaaaatgtcgtaacaactccgccccattgacgcaaatgggcggtaggcgtgtacggtgggaggtctatataagcagagctggtttagtgaaccgtcagatccgctagctggtaccatggaagacgccaaaaacataaagaaaggcccggcgccattctatcctctagaggatggaaccgctggagagcaactgcataaggctatgaagagatacgccctggttcctggaacaattgcttttacagatgcacatatcgaggtgaacatcacgtacgcggaatacttcgaaatgtccgttcggttggcagaagctatgaaacgatatgggctgaatacaaatcacagaatcgtcgtatgcagtgaaaactctcttcaattctttatgccggtgttgggcgcgttatttatcggagttgcagttgcgcccgcgaacgacatttataatgaacgtgaattgctcaacagtatgaacatttcgcagcctaccgtagtgtttgtttccaaaaaggggttgcaaaaaattttgaacgtgcaaaaaaaattaccaataatccagaaaattattatcatggattctaaaacggattaccagggatttcagtcgatgtacacgttcgtcacatctcatctacctcccggttttaatgaatacgattttgtaccagagtcctttgatcgtgacaaaacaattgcactgataatgaattcctctggatctactgggttacctaagggtgtggcccttccgcatagaactgcctgcgtcagattctcgcatgccagagatcctatttttggcaatcaaatcattccggatactgcgattttaagtgttgttccattccatcacggttttggaatgtttactacactcggatatttgatatgtggatttcgagtcgtcttaatgtatagatttgaagaagagctgtttttacgatcccttcaggattacaaaattcaaagtgcgttgctagtaccaaccctattttcattcttcgccaaaagcactctgattgacaaatacgatttatctaatttacacgaaattgcttctgggggcgcacctctttcgaaagaagtcggggaagcggttgcaaaacgcttccatcttccagggatacgacaaggatatgggctcactgagactacatcagctattctgattacacccgagggggatgataaaccgggcgcggtcggtaaagttgttccattttttgaagcgaaggttgtggatctggataccgggaaaacgctgggcgttaatcagagaggcgaattatgtgtcagaggacctatgattatgtccggttatgtaaacaatccggaagcgaccaacgccttgattgacaaggatggatggctacattctggagacatagcttactgggacgaagacgaacacttcttcatagttgaccgcttgaagtctttaattaaatacaaaggatatcaggtggcccccgctgaattggaatcgatattgttacaacaccccaacatcttcgacgcgggcgtggcaggtcttcccgacgatgacgccggtgaacttcccgccgccgttgttgttttggagcacggaaagacgatgacggaaaaagagatcgtggattacgtcgccagtcaagtaacaaccgcgaaaaagttgcgcggaggagttgtgtttgtggacgaagtaccgaaaggtcttaccggaaaactcgacgcaagaaaaatcagagagatcctcataaaggccaagaagggcggaaagtccaaattgtaaggatccgcccctctccctcccccccccctaacgttactggccgaagccgcttggaataaggccggtgtgcgtttgtctatatgttattttccaccatattgccgtcttttggcaatgtgagggcccggaaacctggccctgtcttcttgacgagcattcctaggggtctttcccctctcgccaaaggaatgcaaggtctgttgaatgtcgtgaaggaagcagttcctctggaagcttcttgaagacaaacaacgtctgtagcgaccctttgcaggcagcggaaccccccacctggcgacaggtgcctctgcggccaaaagccacgtgtataagatacacctgcaaaggcggcacaaccccagtgccacgttgtgagttggatagttgtggaaagagtcaaatggctctcctcaagcgtattcaacaaggggctgaaggatgcccagaaggtaccccattgtatgggatctgatctggggcctcggtgcacatgctttacatgtgtttagtcgaggttaaaaaaacgtctaggccccccgaaccacggggacgtggttttcctttgaaaaacacgatgataatatggccacaaccatggacaaagtgctgaatagggaggaaagtctgcaactgatggatctgttgggacttgagaggtctgcatggggtaatatcccacttatgaggaaagcatacctgaagaagtgtaaagagttccatcctgacaaaggtggagatgaagagaagatgaaaaagatgaacacactgtataagaaaatggaagatggtgtaaagtatgctcaccagccagattttggaggtttttgggatgccacagagatacctacttatggtacagatgagtgggaacagtggtggaatgcatttaatgaagagaatttgttttgctctgaggaaatgcctagttctgatgatgaggccacagctgactcccagcacagtactccacccaagaaaaagagaaaagtggaagacccaaaggatttcccctctgaactcttgtccttcttgtctcatgcagtgttctcaaataggaccctggcttgctttgctatctacactactaaggagaaggcagctctcttgtacaagaaaatcatggaaaagtattctgtcacctttatttccaggcacaactcctataatcataatattctctttttcttgacaccccataggcatagggtgagtgcaattaacaactatgctcagaagttgtgtactttctccttcctgatctgtaagggtgtgaataaggagtatctcatgtattcagccctgaccagagacccctttagtgtgattgaagaatccctgcctggtgggctcaaggagcatgatttcaacccagaagaggctgaagaaacaaaacaggtgagctggaagcttgtgactgaatatgcaatggagacaaagtgtgatgatgtcctgctcctcctgggaatgtacctggaatttcagtatagctttgaaatgtgtctgaaatgtatcaaaaaggaacagccttctcattataagtatcatgaaaagcactatgccaatgcagctatatttgcagattctaaaaaccagaaaaccatttgtcagcaagctgttgacacagttctggccaagaaaagagtagactctctccagcttaccagggagcagatgttgacaaataggttcaatgaccttctggacagaatggacataatgtttggctcaactggatctgcagatatagaggagtggatggctggagtggcctggctgcactgtctcctccctaaaatggacagtgtagtctatgacttccttaagtgtatggtctataatatccctaaaaagagatactggttgttcaagggacccattgattcagggaaaactacccttgctgctgcacttctggaactctgtggtgggaaagctctcaatgtcaacctgccacttgatagactcaactttgagctgggggtggcaattgatcagtttttggtagtgtttgaagatgtgaaaggtacaggaggagagtccagggatttgcctagtggccaaggcatcaacaatctggacaacctcagagactacctggatgggtctgtaaaggtcaaccttgaaaaaaagcatctcaacaagaggactcaaatatttccacctggaatagtcactatgaatgaatattcagtgcccaagaccctccaggctagatttgtcaagcaaattgatttcagacctaaagattatctgaaacattgtttggagaggagtgagttcctccttgagaaaaggattattcagtcaggaatagcactgcttcttatgctgatatggtatagaccagtggctgagtttgcccaaagcattcagagtagaatagttgagtggaaagaaaggcttgacaaggagttttctctttcagtatatcaaaagatgaagttcaatgtggctatgggtattggagtgcttgattggttgagaaacagtgatgatgatgatgaagattctcaggaaaatgctgataaaaatgaggatgggggagagaagaatatggaagattctggtcatgaaactggcattgatagtcagagccaggggagtttccaggctccacagagctcccaaagtgtccatgaccacaaccagccttaccatatatgcagaggttttacttgtttcaagaaacctcccactccccctccagaacctgaaacatgagcggccgcgactctagatcataatcagccataccacacctccccctgaacctgaaaaatcaatgcaattattgttgaaataaagcacccagcaatgcctgggaccatgtaaaactgtcctggttctttccaaggtatagagcatagcccacaggctgatatttctggccagggttggttggaggacagccttgtctataggaagagaatgaggtttttgcactataagggcatgcaagtcagtcccgcccctaactccacctggttgcccatcccgcccctaactccgcccagttccgcccattctccgccccatggctgactaattttttttatttatgcagaggcggaggccgcctcggcctctgagctattccagaagtagtgaggaggcttttttggaggcccttaattaaattgacatatctacctaatttgtgtataataaccctgataaatgcttcaataatattgaaaaaggaagagtcctgtataaaaagaaccagctgtggaatgtgtgtcagttagtaggcttatgcaaagtagcccgcccaagagacaggctgaggcccgcccaccatgatagaacaagatggacttcatgctggatctcctgcagcatgggtggaaagactttttggttatgattgggctcagcagaccattggatgttctgatgctgctgtgttcaggcttagtgcacagggtaggccagtgctctttgtgaagactgatctctctggagctttgaatgaactgcaggatgaggctgctaggctttcatggctggccaccacaggtgtcccttgtgctgcagtgttggatgtggttactgaggctgggagggattggctcctcctgggagaagtgccaggtcaggatctgttgagttctcacctggctccagctgaaaaagtctccataatggcagatgctatgagaaggctgcacacattggacccagctacatgcccatttgaccatcaggccaaacacaggattgagagggccagaacaagaatggaggctgggttggtggaccaggatgaccttgatgaggagcatcagggcctggctccagctgaattgtttgccaggctcaaggctagtatgcctgatggggaggatctggtggtaactcatggtgatgcctgtttgcctaacatcatggtggaaaatggaaggttctctggattcattgattgtggaagactgggtgtagctgacaggtatcaggacatagctcttgcaacaagggatattgcagaggagttgggtggagaatgggctgacaggttcctggtcttgtatggcattgctgccccagacagccaaagaattgctttctataggctgttggatgagtttttctaagctcagcacccacaaagctctcaggtcctaagagacactggcacccatatccatgcatcccttgtataaataaagcatccagcaaagctggtaccatgtaaaactgtcttggttgtttccaaggtatagagcatagctcaataggtttttgactttgtcccgcccctctaagtcctgcacacagatactccaatatgacatacagcatgcttgggaactgagtgcccccatgtgggcagagagcaccatgtgccacagtccctgagaagttcttgggaagggtgggcaattgccatgtgtgcctagagaaggttgtttgtaatactgccaagtgccatgtggtgtgatattggctccatgtgccttgtttgtaataacatttccatgtgtcttgggaagaaccatatataagcagagctggtttagtgaaccctcagataggcctagaccatggccagcagtgagaatgtcataacagagttcatgagattcaaggtgaggatggagggaactgtcaatggtcatgagtttgagattgaaggggaaggggagggcagaccctatgagggccacaacacagtcaaattgaaggtgaccaaagggggaccccttccctttgcctgggacatcctgagcccacagtttcagtatggttccaaagtttatgtaaagcaccctgctgacatccctgactacaagaaactgtccttcccagaaggattcaagtgggaaagggtcatgaactttgaggatggaggggttgcaacagtgacccaggacagttctctccaagatggctgtttcatctacaaggtaaaattcattggtgtgaactttccctctgatggcccagtgatgcaaaaaaagaccatgggctgggaagcctcaacagaaaggctgtaccctagagatggagttctcaagggtgagacccacaaagctctaaagctcaaagatgggggccactatctggtggagttcaagagcatctacatggcaaaaaagccagtgcagttgcctggctattactatgtggatgccaagcttgacataacctcacacaatgaagactacactattgtggaacagtatgagaggactgagggaagacatcatctgtttctgtgaattcgcactgcatggacttacctgcctggtggtatcagtcacaggctctgataaggattcagctgttgtataaataaagcatgcagcctagcaggaaccatgttaatctctcttggttgtttccttggaatactcctaagcacattaggtttttagatctgtagaaaagatcaaaggatcttcttgagatcctttttttctgcgcgtaatctgctgcttgcaaacaaaaaaaccaccgctaccagcggtggtttgtttgccggatcaagagctaccaactctttttccgaaggtaactggcttcagcagagcgcagataccaaatactgtccttctagtgtagccgtagttaggccaccacttcaagaactctgtagcaccgcctacatacctcgctctgctaatcctgttaccagtggctgctgccagtggcgataagtcgtgtcttaccgggttggactcaagacgatagttaccggataaggcgcagcggtcgggctgaacggggggttcgtgcacacagcccagcttggagcgaacgacctacaccgaactgagatacctacagcgtgagctatgagaaagcgccacgcttcccgaagggagaaaggcggacaggtatccggtaagcggcagggtcggaacaggagagcgcacgagggagcttccagggggaaacgcctggtatctttatagtcctgtcgggtttcgccacctctgacttgagcgtcgatttttgtgatgctcgtcaggggggcggagcctatggaaaaacgccagcaacgcggcctttttacgg

SEQ ID NO: 613 - DNA, 8150 bp, Artificial Sequence
  pC-Luc-I-T-dSV
ttcctattaatagtaatcaattacggggtcattagttcatagcccatatatggagttccgcgttacataacttacggtaaatggcccgcctggctgaccgcccaacgacccccgcccattgacgtcaataatgacgtatgttcccatagtaacgccaatagggactttccattgacgtcaatgggtggagtatttacggtaaactgcccacttggcagtacatcaagtgtatcatatgccaagtacgccccctattgacgtcaatgacggtaaatggcccgcctggcattatgcccagtacatgaccttatgggactttcctacttggcagtacatctacgtattagtcatcgctattaccatggtgatgcggttttggcagtacatcaatgggcgtggatagcggtttgactcacggggatttccaagtctccaccccattgacgtcaatgggagtttgttttggcaccaaaatcaacgggactttccaaaatgtcgtaacaactccgccccattgacgcaaatgggcggtaggcgtgtacggtgggaggtctatataagcagagctggtttagtgaaccgtcagatccgctagctggtaccatggaagacgccaaaaacataaagaaaggcccggcgccattctatcctctagaggatggaaccgctggagagcaactgcataaggctatgaagagatacgccctggttcctggaacaattgcttttacagatgcacatatcgaggtgaacatcacgtacgcggaatacttcgaaatgtccgttcggttggcagaagctatgaaacgatatgggctgaatacaaatcacagaatcgtcgtatgcagtgaaaactctcttcaattctttatgccggtgttgggcgcgttatttatcggagttgcagttgcgcccgcgaacgacatttataatgaacgtgaattgctcaacagtatgaacatttcgcagcctaccgtagtgtttgtttccaaaaaggggttgcaaaaaattttgaacgtgcaaaaaaaattaccaataatccagaaaattattatcatggattctaaaacggattaccagggatttcagtcgatgtacacgttcgtcacatctcatctacctcccggttttaatgaatacgattttgtaccagagtcctttgatcgtgacaaaacaattgcactgataatgaattcctctggatctactgggttacctaagggtgtggcccttccgcatagaactgcctgcgtcagattctcgcatgccagagatcctatttttggcaatcaaatcattccggatactgcgattttaagtgttgttccattccatcacggttttggaatgtttactacactcggatatttgatatgtggatttcgagtcgtcttaatgtatagatttgaagaagagctgtttttacgatcccttcaggattacaaaattcaaagtgcgttgctagtaccaaccctattttcattcttcgccaaaagcactctgattgacaaatacgatttatctaatttacacgaaattgcttctgggggcgcacctctttcgaaagaagtcggggaagcggttgcaaaacgcttccatcttccagggatacgacaaggatatgggctcactgagactacatcagctattctgattacacccgagggggatgataaaccgggcgcggtcggtaaagttgttccattttttgaagcgaaggttgtggatctggataccgggaaaacgctgggcgttaatcagagaggcgaattatgtgtcagaggacctatgattatgtccggttatgtaaacaatccggaagcgaccaacgccttgattgacaaggatggatggctacattctggagacatagcttactgggacgaagacgaacacttcttcatagttgaccgcttgaagtctttaattaaatacaaaggatatcaggtggcccccgctgaattggaatcgatattgttacaacaccccaacatcttcgacgcgggcgtggcaggtcttcccgacgatgacgccggtgaacttcccgccgccgttgttgttttggagcacggaaagacgatgacggaaaaagagatcgtggattacgtcgccagtcaagtaacaaccgcgaaaaagttgcgcggaggagttgtgtttgtggacgaagtaccgaaaggtcttaccggaaaactcgacgcaagaaaaatcagagagatcctcataaaggccaagaagggcggaaagtccaaattgtaaggatccgcccctctccctcccccccccctaacgttactggccgaagccgcttggaataaggccggtgtgcgtttgtctatatgttattttccaccatattgccgtcttttggcaatgtgagggcccggaaacctggccctgtcttcttgacgagcattcctaggggtctttcccctctcgccaaaggaatgcaaggtctgttgaatgtcgtgaaggaagcagttcctctggaagcttcttgaagacaaacaacgtctgtagcgaccctttgcaggcagcggaaccccccacctggcgacaggtgcctctgcggccaaaagccacgtgtataagatacacctgcaaaggcggcacaaccccagtgccacgttgtgagttggatagttgtggaaagagtcaaatggctctcctcaagcgtattcaacaaggggctgaaggatgcccagaaggtaccccattgtatgggatctgatctggggcctcggtgcacatgctttacatgtgtttagtcgaggttaaaaaaacgtctaggccccccgaaccacggggacgtggttttcctttgaaaaacacgatgataatatggccacaaccatggacaaagtgctgaatagggaggaaagtctgcaactgatggatctgttgggacttgagaggtctgcatggggtaatatcccacttatgaggaaagcatacctgaagaagtgtaaagagttccatcctgacaaaggtggagatgaagagaagatgaaaaagatgaacacactgtataagaaaatggaagatggtgtaaagtatgctcaccagccagattttggaggtttttgggatgccacagagatacctacttatggtacagatgagtgggaacagtggtggaatgcatttaatgaagagaatttgttttgctctgaggaaatgcctagttctgatgatgaggccacagctgactcccagcacagtactccacccaagaaaaagagaaaagtggaagacccaaaggatttcccctctgaactcttgtccttcttgtctcatgcagtgttctcaaataggaccctggcttgctttgctatctacactactaaggagaaggcagctctcttgtacaagaaaatcatggaaaagtattctgtcacctttatttccaggcacaactcctataatcataatattctctttttcttgacaccccataggcatagggtgagtgcaattaacaactatgctcagaagttgtgtactttctccttcctgatctgtaagggtgtgaataaggagtatctcatgtattcagccctgaccagagacccctttagtgtgattgaagaatccctgcctggtgggctcaaggagcatgatttcaacccagaagaggctgaagaaacaaaacaggtgagctggaagcttgtgactgaatatgcaatggagacaaagtgtgatgatgtcctgctcctcctgggaatgtacctggaatttcagtatagctttgaaatgtgtctgaaatgtatcaaaaaggaacagccttctcattataagtatcatgaaaagcactatgccaatgcagctatatttgcagattctaaaaaccagaaaaccatttgtcagcaagctgttgacacagttctggccaagaaaagagtagactctctccagcttaccagggagcagatgttgacaaataggttcaatgaccttctggacagaatggacataatgtttggctcaactggatctgcagatatagaggagtggatggctggagtggcctggctgcactgtctcctccctaaaatggacagtgtagtctatgacttccttaagtgtatggtctataatatccctaaaaagagatactggttgttcaagggacccattgattcagggaaaactacccttgctgctgcacttctggaactctgtggtgggaaagctctcaatgtcaacctgccacttgatagactcaactttgagctgggggtggcaattgatcagtttttggtagtgtttgaagatgtgaaaggtacaggaggagagtccagggatttgcctagtggccaaggcatcaacaatctggacaacctcagagactacctggatgggtctgtaaaggtcaaccttgaaaaaaagcatctcaacaagaggactcaaatatttccacctggaatagtcactatgaatgaatattcagtgcccaagaccctccaggctagatttgtcaagcaaattgatttcagacctaaagattatctgaaacattgtttggagaggagtgagttcctccttgagaaaaggattattcagtcaggaatagcactgcttcttatgctgatatggtatagaccagtggctgagtttgcccaaagcattcagagtagaatagttgagtggaaagaaaggcttgacaaggagttttctctttcagtatatcaaaagatgaagttcaatgtggctatgggtattggagtgcttgattggttgagaaacagtgatgatgatgatgaagattctcaggaaaatgctgataaaaatgaggatgggggagagaagaatatggaagattctggtcatgaaactggcattgatagtcagagccaggggagtttccaggctccacagagctcccaaagtgtccatgaccacaaccagccttaccatatatgcagaggttttacttgtttcaagaaacctcccactccccctccagaacctgaaacatgagcggccgcgactctagatcataatcagccataccacacctccccctgaacctgaaaaatcaatgcaattattgttgaaataaagcacccagcaatgcctgggaccatgtaaaactgtcctggttctttccaaggtatagagcatagcccacaggctgatatttctggccagggttggttggaggacagccttgtctataggaagagaatgaggtttttgcactataagggcatgcaagtcagtcccgcccctaactccacctggttaggaggggaggaggattaataaattgacatatctacctaatttgtgtataataaccctgataaatgcttcaataatattgaaaaaggaagagtcctgtataaaaagaaccagctgtggaatgtgtgtcagttagtaggcttatgcaaagtagcccgcccaagagacaggctgaggcccgcccaccatgatagaacaagatggacttcatgctggatctcctgcagcatgggtggaaagactttttggttatgattgggctcagcagaccattggatgttctgatgctgctgtgttcaggcttagtgcacagggtaggccagtgctctttgtgaagactgatctctctggagctttgaatgaactgcaggatgaggctgctaggctttcatggctggccaccacaggtgtcccttgtgctgcagtgttggatgtggttactgaggctgggagggattggctcctcctgggagaagtgccaggtcaggatctgttgagttctcacctggctccagctgaaaaagtctccataatggcagatgctatgagaaggctgcacacattggacccagctacatgcccatttgaccatcaggccaaacacaggattgagagggccagaacaagaatggaggctgggttggtggaccaggatgaccttgatgaggagcatcagggcctggctccagctgaattgtttgccaggctcaaggctagtatgcctgatggggaggatctggtggtaactcatggtgatgcctgtttgcctaacatcatggtggaaaatggaaggttctctggattcattgattgtggaagactgggtgtagctgacaggtatcaggacatagctcttgcaacaagggatattgcagaggagttgggtggagaatgggctgacaggttcctggtcttgtatggcattgctgccccagacagccaaagaattgctttctataggctgttggatgagtttttctaagctcagcacccacaaagctctcaggtcctaagagacactggcacccatatccatgcatcccttgtataaataaagcatccagcaaagctggtaccatgtaaaactgtcttggttgtttccaaggtatagagcatagctcaataggtttttgactttgtcccgcccctctaagtcctgcacacagatactccaatatgacatacagcatgcttgggaactgagtgcccccatgtgggcagagagcaccatgtgccacagtccctgagaagttcttgggaagggtgggcaattgccatgtgtgcctagagaaggttgtttgtaatactgccaagtgccatgtggtgtgatattggctccatgtgccttgtttgtaataacatttccatgtgtcttgggaagaaccatatataagcagagctggtttagtgaaccctcagataggcctagaccatggccagcagtgagaatgtcataacagagttcatgagattcaaggtgaggatggagggaactgtcaatggtcatgagtttgagattgaaggggaaggggagggcagaccctatgagggccacaacacagtcaaattgaaggtgaccaaagggggaccccttccctttgcctgggacatcctgagcccacagtttcagtatggttccaaagtttatgtaaagcaccctgctgacatccctgactacaagaaactgtccttcccagaaggattcaagtgggaaagggtcatgaactttgaggatggaggggttgcaacagtgacccaggacagttctctccaagatggctgtttcatctacaaggtaaaattcattggtgtgaactttccctctgatggcccagtgatgcaaaaaaagaccatgggctgggaagcctcaacagaaaggctgtaccctagagatggagttctcaagggtgagacccacaaagctctaaagctcaaagatgggggccactatctggtggagttcaagagcatctacatggcaaaaaagccagtgcagttgcctggctattactatgtggatgccaagcttgacataacctcacacaatgaagactacactattgtggaacagtatgagaggactgagggaagacatcatctgtttctgtgaattcgcactgcatggacttacctgcctggtggtatcagtcacaggctctgataaggattcagctgttgtataaataaagcatgcagcctagcaggaaccatgttaatctctcttggttgtttccttggaatactcctaagcacattaggtttttagatctgtagaaaagatcaaaggatcttcttgagatcctttttttctgcgcgtaatctgctgcttgcaaacaaaaaaaccaccgctaccagcggtggtttgtttgccggatcaagagctaccaactctttttccgaaggtaactggcttcagcagagcgcagataccaaatactgtccttctagtgtagccgtagttaggccaccacttcaagaactctgtagcaccgcctacatacctcgctctgctaatcctgttaccagtggctgctgccagtggcgataagtcgtgtcttaccgggttggactcaagacgatagttaccggataaggcgcagcggtcgggctgaacggggggttcgtgcacacagcccagcttggagcgaacgacctacaccgaactgagatacctacagcgtgagctatgagaaagcgccacgcttcccgaagggagaaaggcggacaggtatccggtaagcggcagggtcggaacaggagagcgcacgagggagcttccagggggaaacgcctggtatctttatagtcctgtcgggtttcgccacctctgacttgagcgtcgatttttgtgatgctcgtcaggggggcggagcctatggaaaaacgccagcaacgcggcctttttacgg

SEQ ID NO: 614 - DNA, 9689 bp, Artificial Sequence
  pC-Bgal-I-T-BB3
ttcctattaatagtaatcaattacggggtcattagttcatagcccatatatggagttccgcgttacataacttacggtaaatggcccgcctggctgaccgcccaacgacccccgcccattgacgtcaataatgacgtatgttcccatagtaacgccaatagggactttccattgacgtcaatgggtggagtatttacggtaaactgcccacttggcagtacatcaagtgtatcatatgccaagtacgccccctattgacgtcaatgacggtaaatggcccgcctggcattatgcccagtacatgaccttatgggactttcctacttggcagtacatctacgtattagtcatcgctattaccatggtgatgcggttttggcagtacatcaatgggcgtggatagcggtttgactcacggggatttccaagtctccaccccattgacgtcaatgggagtttgttttggcaccaaaatcaacgggactttccaaaatgtcgtaacaactccgccccattgacgcaaatgggcggtaggcgtgtacggtgggaggtctatataagcagagctggtttagtgaaccgtcagatccgctagcaccatggttacggattcggatcccgtcgttttacaacgtcgtgactgggaaaaccctggcgttacccaacttaatcgccttgcagcacatccccctttcgccagctggcgtaatagcgaagaggcccgcaccgatcgcccttcccaacagttgcgcagcctgaatggcgaatggcgctttgcctggtttccggcaccagaagcggtgccggaaagctggctggagtgcgatcttcctgaggccgatactgtcgtcgtcccctcaaactggcagatgcacggttacgatgcgcccatctacaccaacgtgacctatcccattacggtcaatccgccgtttgttcccacggagaatccgacgggttgttactcgctcacatttaatgttgatgaaagctggctacaggaaggccagacgcgaattatttttgatggcgttaactcggcgtttcatctgtggtgcaacgggcgctgggtcggttacggccaggacagtcgtttgccgtctgaatttgacctgagcgcatttttacgcgccggagaaaaccgcctcgcggtgatggtgctgcgctggagtgacggcagttatctggaagatcaggatatgtggcggatgagcggcattttccgtgacgtctcgttgctgcataaaccgactacacaaatcagcgatttccatgttgccactcgctttaatgatgatttcagccgcgctgtactggaggctgaagttcagatgtgcggcgagttgcgtgactacctacgggtaacagtttctttatggcagggtgaaacgcaggtcgccagcggcaccgcgcctttcggcggtgaaattatcgatgagcgtggtggttatgccgatcgcgtcacactacgtctgaacgtcgaaaacccgaaactgtggagcgccgaaatcccgaatctctatcgtgcggtggttgaactgcacaccgccgacggcacgctgattgaagcagaagcctgcgatgtcggtttccgcgaggtgcggattgaaaatggtctgctgctgctgaacggcaagccgttgctgattcgaggcgttaaccgtcacgagcatcatcctctgcatggtcaggtcatggatgagcagacgatggtgcaggatatcctgctgatgaagcagaacaactttaacgccgtgcgctgttcgcattatccgaaccatccgctgtggtacacgctgtgcgaccgctacggcctgtatgtggtggatgaagccaatattgaaacccacggcatggtgccaatgaatcgtctgaccgatgatccgcgctggctaccggcgatgagcgaacgcgtaacgcgaatggtgcagcgcgatcgtaatcacccgagtgtgatcatctggtcgctggggaatgaatcaggccacggcgctaatcacgacgcgctgtatcgctggatcaaatctgtcgatccttcccgcccggtgcagtatgaaggcggcggagccgacaccacggccaccgatattatttgcccgatgtacgcgcgcgtggatgaagaccagcccttcccggctgtgccgaaatggtccatcaaaaaatggctttcgctacctggagagacgcgcccgctgatcctttgcgaatacgcccacgcgatgggtaacagtcttggcggtttcgctaaatactggcaggcgtttcgtcagtatccccgtttacagggcggcttcgtctgggactgggtggatcagtcgctgattaaatatgatgaaaacggcaacccgtggtcggcttacggcggtgattttggcgatacgccgaacgatcgccagttctgtatgaacggtctggtctttgccgaccgcacgccgcatccagcgctgacggaagcaaaacaccagcagcagtttttccagttccgtttatccgggcaaaccatcgaagtgaccagcgaatacctgttccgtcatagcgataacgagctcctgcactggatggtggcgctggatggtaagccgctggcaagcggtgaagtgcctctggatgtcgctccacaaggtaaacagttgattgaactgcctgaactaccgcagccggagagcgccgggcaactctggctcacagtacgcgtagtgcaaccgaacgcgaccgcatggtcagaagccgggcacatcagcgcctggcagcagtggcgtctggcggaaaacctcagtgtgacgctccccgccgcgtcccacgccatcccgcatctgaccaccagcgaaatggatttttgcatcgagctgggtaataagcgttggcaatttaaccgccagtcaggctttctttcacagatgtggattggcgataaaaaacaactgctgacgccgctgcgcgatcagttcacccgtgcaccgctggataacgacattggcgtaagtgaagcgacccgcattgaccctaacgcctgggtcgaacgctggaaggcggcgggccattaccaggccgaagcagcgttgttgcagtgcacggcagatacacttgctgatgcggtgctgattacgaccgctcacgcgtggcagcatcaggggaaaaccttatttatcagccggaaaacctaccggattgatggtagtggtcaaatggcgattaccgttgatgttgaagtggcgagcgatacaccgcatccggcgcggattggcctgaactgccagctggcgcaggtagcagagcgggtaaactggctcggattagggccgcaagaaaactatcccgaccgccttactgccgcctgttttgaccgctgggatctgccattgtcagacatgtataccccgtacgtcttcccgagcgaaaacggtctgcgctgcgggacgcgcgaattgaattatggcccacaccagtggcgcggcgacttccagttcaacatcagccgctacagtcaacagcaactgatggaaaccagccatcgccatctgctgcacgcggaagaaggcacatggctgaatatcgacggtttccatatggggattggtggcgacgactcctggagcccgtcagtatcggcggaatttcagctgagcgccggtcgctaccattaccagttggtctggtgtcaaaaataaggatccgcccctctccctcccccccccctaacgttactggccgaagccgcttggaataaggccggtgtgcgtttgtctatatgttattttccaccatattgccgtcttttggcaatgtgagggcccggaaacctggccctgtcttcttgacgagcattcctaggggtctttcccctctcgccaaaggaatgcaaggtctgttgaatgtcgtgaaggaagcagttcctctggaagcttcttgaagacaaacaacgtctgtagcgaccctttgcaggcagcggaaccccccacctggcgacaggtgcctctgcggccaaaagccacgtgtataagatacacctgcaaaggcggcacaaccccagtgccacgttgtgagttggatagttgtggaaagagtcaaatggctctcctcaagcgtattcaacaaggggctgaaggatgcccagaaggtaccccattgtatgggatctgatctggggcctcggtgcacatgctttacatgtgtttagtcgaggttaaaaaaacgtctaggccccccgaaccacggggacgtggttttcctttgaaaaacacgatgataatatggccacaaccatggacaaagtgctgaatagggaggaaagtctgcaactgatggatctgttgggacttgagaggtctgcatggggtaatatcccacttatgaggaaagcatacctgaagaagtgtaaagagttccatcctgacaaaggtggagatgaagagaagatgaaaaagatgaacacactgtataagaaaatggaagatggtgtaaagtatgctcaccagccagattttggaggtttttgggatgccacagagatacctacttatggtacagatgagtgggaacagtggtggaatgcatttaatgaagagaatttgttttgctctgaggaaatgcctagttctgatgatgaggccacagctgactcccagcacagtactccacccaagaaaaagagaaaagtggaagacccaaaggatttcccctctgaactcttgtccttcttgtctcatgcagtgttctcaaataggaccctggcttgctttgctatctacactactaaggagaaggcagctctcttgtacaagaaaatcatggaaaagtattctgtcacctttatttccaggcacaactcctataatcataatattctctttttcttgacaccccataggcatagggtgagtgcaattaacaactatgctcagaagttgtgtactttctccttcctgatctgtaagggtgtgaataaggagtatctcatgtattcagccctgaccagagacccctttagtgtgattgaagaatccctgcctggtgggctcaaggagcatgatttcaacccagaagaggctgaagaaacaaaacaggtgagctggaagcttgtgactgaatatgcaatggagacaaagtgtgatgatgtcctgctcctcctgggaatgtacctggaatttcagtatagctttgaaatgtgtctgaaatgtatcaaaaaggaacagccttctcattataagtatcatgaaaagcactatgccaatgcagctatatttgcagattctaaaaaccagaaaaccatttgtcagcaagctgttgacacagttctggccaagaaaagagtagactctctccagcttaccagggagcagatgttgacaaataggttcaatgaccttctggacagaatggacataatgtttggctcaactggatctgcagatatagaggagtggatggctggagtggcctggctgcactgtctcctccctaaaatggacagtgtagtctatgacttccttaagtgtatggtctataatatccctaaaaagagatactggttgttcaagggacccattgattcagggaaaactacccttgctgctgcacttctggaactctgtggtgggaaagctctcaatgtcaacctgccacttgatagactcaactttgagctgggggtggcaattgatcagtttttggtagtgtttgaagatgtgaaaggtacaggaggagagtccagggatttgcctagtggccaaggcatcaacaatctggacaacctcagagactacctggatgggtctgtaaaggtcaaccttgaaaaaaagcatctcaacaagaggactcaaatatttccacctggaatagtcactatgaatgaatattcagtgcccaagaccctccaggctagatttgtcaagcaaattgatttcagacctaaagattatctgaaacattgtttggagaggagtgagttcctccttgagaaaaggattattcagtcaggaatagcactgcttcttatgctgatatggtatagaccagtggctgagtttgcccaaagcattcagagtagaatagttgagtggaaagaaaggcttgacaaggagttttctctttcagtatatcaaaagatgaagttcaatgtggctatgggtattggagtgcttgattggttgagaaacagtgatgatgatgatgaagattctcaggaaaatgctgataaaaatgaggatgggggagagaagaatatggaagattctggtcatgaaactggcattgatagtcagagccaggggagtttccaggctccacagagctcccaaagtgtccatgaccacaaccagccttaccatatatgcagaggttttacttgtttcaagaaacctcccactccccctccagaacctgaaacatgagcggccgcgactctagatcataatcagccataccacacctccccctgaacctgaaaaatcaatgcaattattgttgaaataaagcacccagcaatgcctgggaccatgtaaaactgtcctggttctttccaaggtatagagcatagcccacaggctgatatttctggccagggttggttggaggacagccttgtctataggaagagaatgaggtttttgcactataagggcatgcaagtcagtcccgcccctaactccacctggttgcccatcccgcccctaactccgcccagttccgcccattctccgccccatggctgactaattttttttatttatgcagaggcggaggccgcctcggcctctgagctattccagaagtagtgaggaggcttttttggaggcccttaattaaattgacatatctacctaatttgtgtataataaccctgataaatgcttcaataatattgaaaaaggaagagtcctgtataaaaagaaccagctgtggaatgtgtgtcagttagtaggcttatgcaaagtagcccgcccaagagacaggctgaggcccgcccaccatgatagaacaagatggacttcatgctggatctcctgcagcatgggtggaaagactttttggttatgattgggctcagcagaccattggatgttctgatgctgctgtgttcaggcttagtgcacagggtaggccagtgctctttgtgaagactgatctctctggagctttgaatgaactgcaggatgaggctgctaggctttcatggctggccaccacaggtgtcccttgtgctgcagtgttggatgtggttactgaggctgggagggattggctcctcctgggagaagtgccaggtcaggatctgttgagttctcacctggctccagctgaaaaagtctccataatggcagatgctatgagaaggctgcacacattggacccagctacatgcccatttgaccatcaggccaaacacaggattgagagggccagaacaagaatggaggctgggttggtggaccaggatgaccttgatgaggagcatcagggcctggctccagctgaattgtttgccaggctcaaggctagtatgcctgatggggaggatctggtggtaactcatggtgatgcctgtttgcctaacatcatggtggaaaatggaaggttctctggattcattgattgtggaagactgggtgtagctgacaggtatcaggacatagctcttgcaacaagggatattgcagaggagttgggtggagaatgggctgacaggttcctggtcttgtatggcattgctgccccagacagccaaagaattgctttctataggctgttggatgagtttttctaagctcagcacccacaaagctctcaggtcctaagagacactggcacccatatccatgcatcccttgtataaataaagcatccagcaaagctggtaccatgtaaaactgtcttggttgtttccaaggtatagagcatagctcaataggtttttgactttgtcccgcccctctaagtcctgcacacagatactccaatatgacatacagcatgcttgggaactgagtgcccccatgtgggcagagagcaccatgtgccacagtccctgagaagttcttgggaagggtgggcaattgccatgtgtgcctagagaaggttgtttgtaatactgccaagtgccatgtggtgtgatattggctccatgtgccttgtttgtaataacatttccatgtgtcttgggaagaaccatatataagcagagctggtttagtgaaccctcagataggcctagaccatggccagcagtgagaatgtcataacagagttcatgagattcaaggtgaggatggagggaactgtcaatggtcatgagtttgagattgaaggggaaggggagggcagaccctatgagggccacaacacagtcaaattgaaggtgaccaaagggggaccccttccctttgcctgggacatcctgagcccacagtttcagtatggttccaaagtttatgtaaagcaccctgctgacatccctgactacaagaaactgtccttcccagaaggattcaagtgggaaagggtcatgaactttgaggatggaggggttgcaacagtgacccaggacagttctctccaagatggctgtttcatctacaaggtaaaattcattggtgtgaactttccctctgatggcccagtgatgcaaaaaaagaccatgggctgggaagcctcaacagaaaggctgtaccctagagatggagttctcaagggtgagacccacaaagctctaaagctcaaagatgggggccactatctggtggagttcaagagcatctacatggcaaaaaagccagtgcagttgcctggctattactatgtggatgccaagcttgacataacctcacacaatgaagactacactattgtggaacagtatgagaggactgagggaagacatcatctgtttctgtgaattcgcactgcatggacttacctgcctggtggtatcagtcacaggctctgataaggattcagctgttgtataaataaagcatgcagcctagcaggaaccatgttaatctctcttggttgtttccttggaatactcctaagcacattaggtttttagatctgtagaaaagatcaaaggatcttcttgagatcctttttttctgcgcgtaatctgctgcttgcaaacaaaaaaaccaccgctaccagcggtggtttgtttgccggatcaagagctaccaactctttttccgaaggtaactggcttcagcagagcgcagataccaaatactgtccttctagtgtagccgtagttaggccaccacttcaagaactctgtagcaccgcctacatacctcgctctgctaatcctgttaccagtggctgctgccagtggcgataagtcgtgtcttaccgggttggactcaagacgatagttaccggataaggcgcagcggtcgggctgaacggggggttcgtgcacacagcccagcttggagcgaacgacctacaccgaactgagatacctacagcgtgagctatgagaaagcgccacgcttcccgaagggagaaaggcggacaggtatccggtaagcggcagggtcggaacaggagagcgcacgagggagcttccagggggaaacgcctggtatctttatagtcctgtcgggtttcgccacctctgacttgagcgtcgatttttgtgatgctcgtcaggggggcggagcctatggaaaaacgccagcaacgcggcctttttacgg

SEQ ID NO: 615 - DNA, 9562 bp, Artificial Sequence
  pC-Bgal-I-T-dSV
ttcctattaatagtaatcaattacggggtcattagttcatagcccatatatggagttccgcgttacataacttacggtaaatggcccgcctggctgaccgcccaacgacccccgcccattgacgtcaataatgacgtatgttcccatagtaacgccaatagggactttccattgacgtcaatgggtggagtatttacggtaaactgcccacttggcagtacatcaagtgtatcatatgccaagtacgccccctattgacgtcaatgacggtaaatggcccgcctggcattatgcccagtacatgaccttatgggactttcctacttggcagtacatctacgtattagtcatcgctattaccatggtgatgcggttttggcagtacatcaatgggcgtggatagcggtttgactcacggggatttccaagtctccaccccattgacgtcaatgggagtttgttttggcaccaaaatcaacgggactttccaaaatgtcgtaacaactccgccccattgacgcaaatgggcggtaggcgtgtacggtgggaggtctatataagcagagctggtttagtgaaccgtcagatccgctagcaccatggttacggattcggatcccgtcgttttacaacgtcgtgactgggaaaaccctggcgttacccaacttaatcgccttgcagcacatccccctttcgccagctggcgtaatagcgaagaggcccgcaccgatcgcccttcccaacagttgcgcagcctgaatggcgaatggcgctttgcctggtttccggcaccagaagcggtgccggaaagctggctggagtgcgatcttcctgaggccgatactgtcgtcgtcccctcaaactggcagatgcacggttacgatgcgcccatctacaccaacgtgacctatcccattacggtcaatccgccgtttgttcccacggagaatccgacgggttgttactcgctcacatttaatgttgatgaaagctggctacaggaaggccagacgcgaattatttttgatggcgttaactcggcgtttcatctgtggtgcaacgggcgctgggtcggttacggccaggacagtcgtttgccgtctgaatttgacctgagcgcatttttacgcgccggagaaaaccgcctcgcggtgatggtgctgcgctggagtgacggcagttatctggaagatcaggatatgtggcggatgagcggcattttccgtgacgtctcgttgctgcataaaccgactacacaaatcagcgatttccatgttgccactcgctttaatgatgatttcagccgcgctgtactggaggctgaagttcagatgtgcggcgagttgcgtgactacctacgggtaacagtttctttatggcagggtgaaacgcaggtcgccagcggcaccgcgcctttcggcggtgaaattatcgatgagcgtggtggttatgccgatcgcgtcacactacgtctgaacgtcgaaaacccgaaactgtggagcgccgaaatcccgaatctctatcgtgcggtggttgaactgcacaccgccgacggcacgctgattgaagcagaagcctgcgatgtcggtttccgcgaggtgcggattgaaaatggtctgctgctgctgaacggcaagccgttgctgattcgaggcgttaaccgtcacgagcatcatcctctgcatggtcaggtcatggatgagcagacgatggtgcaggatatcctgctgatgaagcagaacaactttaacgccgtgcgctgttcgcattatccgaaccatccgctgtggtacacgctgtgcgaccgctacggcctgtatgtggtggatgaagccaatattgaaacccacggcatggtgccaatgaatcgtctgaccgatgatccgcgctggctaccggcgatgagcgaacgcgtaacgcgaatggtgcagcgcgatcgtaatcacccgagtgtgatcatctggtcgctggggaatgaatcaggccacggcgctaatcacgacgcgctgtatcgctggatcaaatctgtcgatccttcccgcccggtgcagtatgaaggcggcggagccgacaccacggccaccgatattatttgcccgatgtacgcgcgcgtggatgaagaccagcccttcccggctgtgccgaaatggtccatcaaaaaatggctttcgctacctggagagacgcgcccgctgatcctttgcgaatacgcccacgcgatgggtaacagtcttggcggtttcgctaaatactggcaggcgtttcgtcagtatccccgtttacagggcggcttcgtctgggactgggtggatcagtcgctgattaaatatgatgaaaacggcaacccgtggtcggcttacggcggtgattttggcgatacgccgaacgatcgccagttctgtatgaacggtctggtctttgccgaccgcacgccgcatccagcgctgacggaagcaaaacaccagcagcagtttttccagttccgtttatccgggcaaaccatcgaagtgaccagcgaatacctgttccgtcatagcgataacgagctcctgcactggatggtggcgctggatggtaagccgctggcaagcggtgaagtgcctctggatgtcgctccacaaggtaaacagttgattgaactgcctgaactaccgcagccggagagcgccgggcaactctggctcacagtacgcgtagtgcaaccgaacgcgaccgcatggtcagaagccgggcacatcagcgcctggcagcagtggcgtctggcggaaaacctcagtgtgacgctccccgccgcgtcccacgccatcccgcatctgaccaccagcgaaatggatttttgcatcgagctgggtaataagcgttggcaatttaaccgccagtcaggctttctttcacagatgtggattggcgataaaaaacaactgctgacgccgctgcgcgatcagttcacccgtgcaccgctggataacgacattggcgtaagtgaagcgacccgcattgaccctaacgcctgggtcgaacgctggaaggcggcgggccattaccaggccgaagcagcgttgttgcagtgcacggcagatacacttgctgatgcggtgctgattacgaccgctcacgcgtggcagcatcaggggaaaaccttatttatcagccggaaaacctaccggattgatggtagtggtcaaatggcgattaccgttgatgttgaagtggcgagcgatacaccgcatccggcgcggattggcctgaactgccagctggcgcaggtagcagagcgggtaaactggctcggattagggccgcaagaaaactatcccgaccgccttactgccgcctgttttgaccgctgggatctgccattgtcagacatgtataccccgtacgtcttcccgagcgaaaacggtctgcgctgcgggacgcgcgaattgaattatggcccacaccagtggcgcggcgacttccagttcaacatcagccgctacagtcaacagcaactgatggaaaccagccatcgccatctgctgcacgcggaagaaggcacatggctgaatatcgacggtttccatatggggattggtggcgacgactcctggagcccgtcagtatcggcggaatttcagctgagcgccggtcgctaccattaccagttggtctggtgtcaaaaataaggatccgcccctctccctcccccccccctaacgttactggccgaagccgcttggaataaggccggtgtgcgtttgtctatatgttattttccaccatattgccgtcttttggcaatgtgagggcccggaaacctggccctgtcttcttgacgagcattcctaggggtctttcccctctcgccaaaggaatgcaaggtctgttgaatgtcgtgaaggaagcagttcctctggaagcttcttgaagacaaacaacgtctgtagcgaccctttgcaggcagcggaaccccccacctggcgacaggtgcctctgcggccaaaagccacgtgtataagatacacctgcaaaggcggcacaaccccagtgccacgttgtgagttggatagttgtggaaagagtcaaatggctctcctcaagcgtattcaacaaggggctgaaggatgcccagaaggtaccccattgtatgggatctgatctggggcctcggtgcacatgctttacatgtgtttagtcgaggttaaaaaaacgtctaggccccccgaaccacggggacgtggttttcctttgaaaaacacgatgataatatggccacaaccatggacaaagtgctgaatagggaggaaagtctgcaactgatggatctgttgggacttgagaggtctgcatggggtaatatcccacttatgaggaaagcatacctgaagaagtgtaaagagttccatcctgacaaaggtggagatgaagagaagatgaaaaagatgaacacactgtataagaaaatggaagatggtgtaaagtatgctcaccagccagattttggaggtttttgggatgccacagagatacctacttatggtacagatgagtgggaacagtggtggaatgcatttaatgaagagaatttgttttgctctgaggaaatgcctagttctgatgatgaggccacagctgactcccagcacagtactccacccaagaaaaagagaaaagtggaagacccaaaggatttcccctctgaactcttgtccttcttgtctcatgcagtgttctcaaataggaccctggcttgctttgctatctacactactaaggagaaggcagctctcttgtacaagaaaatcatggaaaagtattctgtcacctttatttccaggcacaactcctataatcataatattctctttttcttgacaccccataggcatagggtgagtgcaattaacaactatgctcagaagttgtgtactttctccttcctgatctgtaagggtgtgaataaggagtatctcatgtattcagccctgaccagagacccctttagtgtgattgaagaatccctgcctggtgggctcaaggagcatgatttcaacccagaagaggctgaagaaacaaaacaggtgagctggaagcttgtgactgaatatgcaatggagacaaagtgtgatgatgtcctgctcctcctgggaatgtacctggaatttcagtatagctttgaaatgtgtctgaaatgtatcaaaaaggaacagccttctcattataagtatcatgaaaagcactatgccaatgcagctatatttgcagattctaaaaaccagaaaaccatttgtcagcaagctgttgacacagttctggccaagaaaagagtagactctctccagcttaccagggagcagatgttgacaaataggttcaatgaccttctggacagaatggacataatgtttggctcaactggatctgcagatatagaggagtggatggctggagtggcctggctgcactgtctcctccctaaaatggacagtgtagtctatgacttccttaagtgtatggtctataatatccctaaaaagagatactggttgttcaagggacccattgattcagggaaaactacccttgctgctgcacttctggaactctgtggtgggaaagctctcaatgtcaacctgccacttgatagactcaactttgagctgggggtggcaattgatcagtttttggtagtgtttgaagatgtgaaaggtacaggaggagagtccagggatttgcctagtggccaaggcatcaacaatctggacaacctcagagactacctggatgggtctgtaaaggtcaaccttgaaaaaaagcatctcaacaagaggactcaaatatttccacctggaatagtcactatgaatgaatattcagtgcccaagaccctccaggctagatttgtcaagcaaattgatttcagacctaaagattatctgaaacattgtttggagaggagtgagttcctccttgagaaaaggattattcagtcaggaatagcactgcttcttatgctgatatggtatagaccagtggctgagtttgcccaaagcattcagagtagaatagttgagtggaaagaaaggcttgacaaggagttttctctttcagtatatcaaaagatgaagttcaatgtggctatgggtattggagtgcttgattggttgagaaacagtgatgatgatgatgaagattctcaggaaaatgctgataaaaatgaggatgggggagagaagaatatggaagattctggtcatgaaactggcattgatagtcagagccaggggagtttccaggctccacagagctcccaaagtgtccatgaccacaaccagccttaccatatatgcagaggttttacttgtttcaagaaacctcccactccccctccagaacctgaaacatgagcggccgcgactctagatcataatcagccataccacacctccccctgaacctgaaaaatcaatgcaattattgttgaaataaagcacccagcaatgcctgggaccatgtaaaactgtcctggttctttccaaggtatagagcatagcccacaggctgatatttctggccagggttggttggaggacagccttgtctataggaagagaatgaggtttttgcactataagggcatgcaagtcagtcccgcccctaactccacctggttaggaggggaggaggattaataaattgacatatctacctaatttgtgtataataaccctgataaatgcttcaataatattgaaaaaggaagagtcctgtataaaaagaaccagctgtggaatgtgtgtcagttagtaggcttatgcaaagtagcccgcccaagagacaggctgaggcccgcccaccatgatagaacaagatggacttcatgctggatctcctgcagcatgggtggaaagactttttggttatgattgggctcagcagaccattggatgttctgatgctgctgtgttcaggcttagtgcacagggtaggccagtgctctttgtgaagactgatctctctggagctttgaatgaactgcaggatgaggctgctaggctttcatggctggccaccacaggtgtcccttgtgctgcagtgttggatgtggttactgaggctgggagggattggctcctcctgggagaagtgccaggtcaggatctgttgagttctcacctggctccagctgaaaaagtctccataatggcagatgctatgagaaggctgcacacattggacccagctacatgcccatttgaccatcaggccaaacacaggattgagagggccagaacaagaatggaggctgggttggtggaccaggatgaccttgatgaggagcatcagggcctggctccagctgaattgtttgccaggctcaaggctagtatgcctgatggggaggatctggtggtaactcatggtgatgcctgtttgcctaacatcatggtggaaaatggaaggttctctggattcattgattgtggaagactgggtgtagctgacaggtatcaggacatagctcttgcaacaagggatattgcagaggagttgggtggagaatgggctgacaggttcctggtcttgtatggcattgctgccccagacagccaaagaattgctttctataggctgttggatgagtttttctaagctcagcacccacaaagctctcaggtcctaagagacactggcacccatatccatgcatcccttgtataaataaagcatccagcaaagctggtaccatgtaaaactgtcttggttgtttccaaggtatagagcatagctcaataggtttttgactttgtcccgcccctctaagtcctgcacacagatactccaatatgacatacagcatgcttgggaactgagtgcccccatgtgggcagagagcaccatgtgccacagtccctgagaagttcttgggaagggtgggcaattgccatgtgtgcctagagaaggttgtttgtaatactgccaagtgccatgtggtgtgatattggctccatgtgccttgtttgtaataacatttccatgtgtcttgggaagaaccatatataagcagagctggtttagtgaaccctcagataggcctagaccatggccagcagtgagaatgtcataacagagttcatgagattcaaggtgaggatggagggaactgtcaatggtcatgagtttgagattgaaggggaaggggagggcagaccctatgagggccacaacacagtcaaattgaaggtgaccaaagggggaccccttccctttgcctgggacatcctgagcccacagtttcagtatggttccaaagtttatgtaaagcaccctgctgacatccctgactacaagaaactgtccttcccagaaggattcaagtgggaaagggtcatgaactttgaggatggaggggttgcaacagtgacccaggacagttctctccaagatggctgtttcatctacaaggtaaaattcattggtgtgaactttccctctgatggcccagtgatgcaaaaaaagaccatgggctgggaagcctcaacagaaaggctgtaccctagagatggagttctcaagggtgagacccacaaagctctaaagctcaaagatgggggccactatctggtggagttcaagagcatctacatggcaaaaaagccagtgcagttgcctggctattactatgtggatgccaagcttgacataacctcacacaatgaagactacactattgtggaacagtatgagaggactgagggaagacatcatctgtttctgtgaattcgcactgcatggacttacctgcctggtggtatcagtcacaggctctgataaggattcagctgttgtataaataaagcatgcagcctagcaggaaccatgttaatctctcttggttgtttccttggaatactcctaagcacattaggtttttagatctgtagaaaagatcaaaggatcttcttgagatcctttttttctgcgcgtaatctgctgcttgcaaacaaaaaaaccaccgctaccagcggtggtttgtttgccggatcaagagctaccaactctttttccgaaggtaactggcttcagcagagcgcagataccaaatactgtccttctagtgtagccgtagttaggccaccacttcaagaactctgtagcaccgcctacatacctcgctctgctaatcctgttaccagtggctgctgccagtggcgataagtcgtgtcttaccgggttggactcaagacgatagttaccggataaggcgcagcggtcgggctgaacggggggttcgtgcacacagcccagcttggagcgaacgacctacaccgaactgagatacctacagcgtgagctatgagaaagcgccacgcttcccgaagggagaaaggcggacaggtatccggtaagcggcagggtcggaacaggagagcgcacgagggagcttccagggggaaacgcctggtatctttatagtcctgtcgggtttcgccacctctgacttgagcgtcgatttttgtgatgctcgtcaggggggcggagcctatggaaaaacgccagcaacgcggcctttttacgg

SEQ ID NO: 616 - DNA, 7343 bp, Artificial Sequence
  pCzGFP-I-T(L19F)-BB3
  CDS (1917)...(4040): Large T Antigen
  mutation (1971)...(1973): L19F
ttcctattaatagtaatcaattacggggtcattagttcatagcccatatatggagttccgcgttacataacttacggtaaatggcccgcctggctgaccgcccaacgacccccgcccattgacgtcaataatgacgtatgttcccatagtaacgccaatagggactttccattgacgtcaatgggtggagtatttacggtaaactgcccacttggcagtacatcaagtgtatcatatgccaagtacgccccctattgacgtcaatgacggtaaatggcccgcctggcattatgcccagtacatgaccttatgggactttcctacttggcagtacatctacgtattagtcatcgctattaccatggtgatgcggttttggcagtacatcaatgggcgtggatagcggtttgactcacggggatttccaagtctccaccccattgacgtcaatgggagtttgttttggcaccaaaatcaacgggactttccaaaatgtcgtaacaactccgccccattgacgcaaatgggcggtaggcgtgtacggtgggaggtctatataagcagagctggtttagtgaaccgtcagatccgctagctagaccatggtgagcaagggagaggaactctttacaggtgtggtcccaattctggtggagctggatggagatgtgaatgggcacaaattttctgtcagtggagagggagagggggatgctacctatggcaaactgactctgaagttcatctgcactactggcaagctgcctgtgccatggccaactctggtgacaaccctcacctatggagtccagtgcttttccagatatcctgaccacatgaaacagcatgactttttcaaatctgcaatgcctgagggctatgtgcaagagagaactatctttttcaaggatgatgggaactataagactagggctgaggtgaaatttgaaggagacaccctggtcaataggattgagctcaaggggattgacttcaaggaggatggcaacattctgggccataagctggagtataattacaattcccacaatgtctacattatggctgacaagcagaagaatggcattaaggtcaacttcaagattagacacaacatagaggatggatctgtgcagctggctgaccattaccagcagaatacacctattggggatgggccagtgctgctccctgacaatcactatctgagcacccaatctgctttgtctaaagatcctaatgaaaagagagatcacatggtgctgctggagtttgtaactgctgcaggaattaccttgggtatggatgaactctataagtaaggatccgcccctctccctcccccccccctaacgttactggccgaagccgcttggaataaggccggtgtgcgtttgtctatatgttattttccaccatattgccgtcttttggcaatgtgagggcccggaaacctggccctgtcttcttgacgagcattcctaggggtctttcccctctcgccaaaggaatgcaaggtctgttgaatgtcgtgaaggaagcagttcctctggaagcttcttgaagacaaacaacgtctgtagcgaccctttgcaggcagcggaaccccccacctggcgacaggtgcctctgcggccaaaagccacgtgtataagatacacctgcaaaggcggcacaaccccagtgccacgttgtgagttggatagttgtggaaagagtcaaatggctctcctcaagcgtattcaacaaggggctgaaggatgcccagaaggtaccccattgtatgggatctgatctggggcctcggtgcacatgctttacatgtgtttagtcgaggttaaaaaaacgtctaggccccccgaaccacggggacgtggttttcctttgaaaaacacgatgataatatggccacaaccatggacaaagtgctgaatagggaggaaagtctgcaactgatggatctgttgggacttgagaggtttgcatggggtaatatcccacttatgaggaaagcatacctgaagaagtgtaaagagttccatcctgacaaaggtggagatgaagagaagatgaaaaagatgaacacactgtataagaaaatggaagatggtgtaaagtatgctcaccagccagattttggaggtttttgggatgccacagagatacctacttatggtacagatgagtgggaacagtggtggaatgcatttaatgaagagaatttgttttgctctgaggaaatgcctagttctgatgatgaggccacagctgactcccagcacagtactccacccaagaaaaagagaaaagtggaagacccaaaggatttcccctctgaactcttgtccttcttgtctcatgcagtgttctcaaataggaccctggcttgctttgctatctacactactaaggagaaggcagctctcttgtacaagaaaatcatggaaaagtattctgtcacctttatttccaggcacaactcctataatcataatattctctttttcttgacaccccataggcatagggtgagtgcaattaacaactatgctcagaagttgtgtactttctccttcctgatctgtaagggtgtgaataaggagtatctcatgtattcagccctgaccagagacccctttagtgtgattgaagaatccctgcctggtgggctcaaggagcatgatttcaacccagaagaggctgaagaaacaaaacaggtgagctggaagcttgtgactgaatatgcaatggagacaaagtgtgatgatgtcctgctcctcctgggaatgtacctggaatttcagtatagctttgaaatgtgtctgaaatgtatcaaaaaggaacagccttctcattataagtatcatgaaaagcactatgccaatgcagctatatttgcagattctaaaaaccagaaaaccatttgtcagcaagctgttgacacagttctggccaagaaaagagtagactctctccagcttaccagggagcagatgttgacaaataggttcaatgaccttctggacagaatggacataatgtttggctcaactggatctgcagatatagaggagtggatggctggagtggcctggctgcactgtctcctccctaaaatggacagtgtagtctatgacttccttaagtgtatggtctataatatccctaaaaagagatactggttgttcaagggacccattgattcagggaaaactacccttgctgctgcacttctggaactctgtggtgggaaagctctcaatgtcaacctgccacttgatagactcaactttgagctgggggtggcaattgatcagtttttggtagtgtttgaagatgtgaaaggtacaggaggagagtccagggatttgcctagtggccaaggcatcaacaatctggacaacctcagagactacctggatgggtctgtaaaggtcaaccttgaaaaaaagcatctcaacaagaggactcaaatatttccacctggaatagtcactatgaatgaatattcagtgcccaagaccctccaggctagatttgtcaagcaaattgatttcagacctaaagattatctgaaacattgtttggagaggagtgagttcctccttgagaaaaggattattcagtcaggaatagcactgcttcttatgctgatatggtatagaccagtggctgagtttgcccaaagcattcagagtagaatagttgagtggaaagaaaggcttgacaaggagttttctctttcagtatatcaaaagatgaagttcaatgtggctatgggtattggagtgcttgattggttgagaaacagtgatgatgatgatgaagattctcaggaaaatgctgataaaaatgaggatgggggagagaagaatatggaagattctggtcatgaaactggcattgatagtcagagccaggggagtttccaggctccacagagctcccaaagtgtccatgaccacaaccagccttaccatatatgcagaggttttacttgtttcaagaaacctcccactccccctccagaacctgaaacatgagcggccgcgactctagatcataatcagccataccacacctccccctgaacctgaaaaatcaatgcaattattgttgaaataaagcacccagcaatgcctgggaccatgtaaaactgtcctggttctttccaaggtatagagcatagcccacaggctgatatttctggccagggttggttggaggacagccttgtctataggaagagaatgaggtttttgcactataagggcatgcaagtcagtcccgcccctaactccacctggttgcccatcccgcccctaactccgcccagttccgcccattctccgccccatggctgactaattttttttatttatgcagaggcggaggccgcctcggcctctgagctattccagaagtagtgaggaggcttttttggaggcccttaattaaattgacatatctacctaatttgtgtataataaccctgataaatgcttcaataatattgaaaaaggaagagtcctgtataaaaagaaccagctgtggaatgtgtgtcagttagtaggcttatgcaaagtagcccgcccaagagacaggctgaggcccgcccaccatgatagaacaagatggacttcatgctggatctcctgcagcatgggtggaaagactttttggttatgattgggctcagcagaccattggatgttctgatgctgctgtgttcaggcttagtgcacagggtaggccagtgctctttgtgaagactgatctctctggagctttgaatgaactgcaggatgaggctgctaggctttcatggctggccaccacaggtgtcccttgtgctgcagtgttggatgtggttactgaggctgggagggattggctcctcctgggagaagtgccaggtcaggatctgttgagttctcacctggctccagctgaaaaagtctccataatggcagatgctatgagaaggctgcacacattggacccagctacatgcccatttgaccatcaggccaaacacaggattgagagggccagaacaagaatggaggctgggttggtggaccaggatgaccttgatgaggagcatcagggcctggctccagctgaattgtttgccaggctcaaggctagtatgcctgatggggaggatctggtggtaactcatggtgatgcctgtttgcctaacatcatggtggaaaatggaaggttctctggattcattgattgtggaagactgggtgtagctgacaggtatcaggacatagctcttgcaacaagggatattgcagaggagttgggtggagaatgggctgacaggttcctggtcttgtatggcattgctgccccagacagccaaagaattgctttctataggctgttggatgagtttttctaagctcagcacccacaaagctctcaggtcctaagagacactggcacccatatccatgcatcccttgtataaataaagcatccagcaaagctggtaccatgtaaaactgtcttggttgtttccaaggtatagagcatagctcaataggtttttgactttgtcccgcccctctaagtcctgcacacagatactccaatatgacatacagcatgcttgggaactgagtgcccccatgtgggcagagagcaccatgtgccacagtccctgagaagttcttgggaagggtgggcaattgccatgtgtgcctagagaaggttgtttgtaatactgccaagtgccatgtggtgtgatattggctccatgtgccttgtttgtaataacatttccatgtgtcttgggaagaaccatatataagcagagctggtttagtgaaccctcagataggcctagaccatggccagcagtgagaatgtcataacagagttcatgagattcaaggtgaggatggagggaactgtcaatggtcatgagtttgagattgaaggggaaggggagggcagaccctatgagggccacaacacagtcaaattgaaggtgaccaaagggggaccccttccctttgcctgggacatcctgagcccacagtttcagtatggttccaaagtttatgtaaagcaccctgctgacatccctgactacaagaaactgtccttcccagaaggattcaagtgggaaagggtcatgaactttgaggatggaggggttgcaacagtgacccaggacagttctctccaagatggctgtttcatctacaaggtaaaattcattggtgtgaactttccctctgatggcccagtgatgcaaaaaaagaccatgggctgggaagcctcaacagaaaggctgtaccctagagatggagttctcaagggtgagacccacaaagctctaaagctcaaagatgggggccactatctggtggagttcaagagcatctacatggcaaaaaagccagtgcagttgcctggctattactatgtggatgccaagcttgacataacctcacacaatgaagactacactattgtggaacagtatgagaggactgagggaagacatcatctgtttctgtgaattcgcactgcatggacttacctgcctggtggtatcagtcacaggctctgataaggattcagctgttgtataaataaagcatgcagcctagcaggaaccatgttaatctctcttggttgtttccttggaatactcctaagcacattaggtttttagatctgtagaaaagatcaaaggatcttcttgagatcctttttttctgcgcgtaatctgctgcttgcaaacaaaaaaaccaccgctaccagcggtggtttgtttgccggatcaagagctaccaactctttttccgaaggtaactggcttcagcagagcgcagataccaaatactgtccttctagtgtagccgtagttaggccaccacttcaagaactctgtagcaccgcctacatacctcgctctgctaatcctgttaccagtggctgctgccagtggcgataagtcgtgtcttaccgggttggactcaagacgatagttaccggataaggcgcagcggtcgggctgaacggggggttcgtgcacacagcccagcttggagcgaacgacctacaccgaactgagatacctacagcgtgagctatgagaaagcgccacgcttcccgaagggagaaaggcggacaggtatccggtaagcggcagggtcggaacaggagagcgcacgagggagcttccagggggaaacgcctggtatctttatagtcctgtcgggtttcgccacctctgacttgagcgtcgatttttgtgatgctcgtcaggggggcggagcctatggaaaaacgccagcaacgcggcctttttacgg

SEQ ID NO: 617 - DNA, 7343 bp, Artificial Sequence
  pCzGFP-I-T(P28S)-BB3
  CDS (1917)...(4040): Large T Antigen
  mutation (1998)...(2000): cca to tca (P28S)
ttcctattaatagtaatcaattacggggtcattagttcatagcccatatatggagttccgcgttacataacttacggtaaatggcccgcctggctgaccgcccaacgacccccgcccattgacgtcaataatgacgtatgttcccatagtaacgccaatagggactttccattgacgtcaatgggtggagtatttacggtaaactgcccacttggcagtacatcaagtgtatcatatgccaagtacgccccctattgacgtcaatgacggtaaatggcccgcctggcattatgcccagtacatgaccttatgggactttcctacttggcagtacatctacgtattagtcatcgctattaccatggtgatgcggttttggcagtacatcaatgggcgtggatagcggtttgactcacggggatttccaagtctccaccccattgacgtcaatgggagtttgttttggcaccaaaatcaacgggactttccaaaatgtcgtaacaactccgccccattgacgcaaatgggcggtaggcgtgtacggtgggaggtctatataagcagagctggtttagtgaaccgtcagatccgctagctagaccatggtgagcaagggagaggaactctttacaggtgtggtcccaattctggtggagctggatggagatgtgaatgggcacaaattttctgtcagtggagagggagagggggatgctacctatggcaaactgactctgaagttcatctgcactactggcaagctgcctgtgccatggccaactctggtgacaaccctcacctatggagtccagtgcttttccagatatcctgaccacatgaaacagcatgactttttcaaatctgcaatgcctgagggctatgtgcaagagagaactatctttttcaaggatgatgggaactataagactagggctgaggtgaaatttgaaggagacaccctggtcaataggattgagctcaaggggattgacttcaaggaggatggcaacattctgggccataagctggagtataattacaattcccacaatgtctacattatggctgacaagcagaagaatggcattaaggtcaacttcaagattagacacaacatagaggatggatctgtgcagctggctgaccattaccagcagaatacacctattggggatgggccagtgctgctccctgacaatcactatctgagcacccaatctgctttgtctaaagatcctaatgaaaagagagatcacatggtgctgctggagtttgtaactgctgcaggaattaccttgggtatggatgaactctataagtaaggatccgcccctctccctcccccccccctaacgttactggccgaagccgcttggaataaggccggtgtgcgtttgtctatatgttattttccaccatattgccgtcttttggcaatgtgagggcccggaaacctggccctgtcttcttgacgagcattcctaggggtctttcccctctcgccaaaggaatgcaaggtctgttgaatgtcgtgaaggaagcagttcctctggaagcttcttgaagacaaacaacgtctgtagcgaccctttgcaggcagcggaaccccccacctggcgacaggtgcctctgcggccaaaagccacgtgtataagatacacctgcaaaggcggcacaaccccagtgccacgttgtgagttggatagttgtggaaagagtcaaatggctctcctcaagcgtattcaacaaggggctgaaggatgcccagaaggtaccccattgtatgggatctgatctggggcctcggtgcacatgctttacatgtgtttagtcgaggttaaaaaaacgtctaggccccccgaaccacggggacgtggttttcctttgaaaaacacgatgataatatggccacaaccatggacaaagtgctgaatagggaggaaagtctgcaactgatggatctgttgggacttgagaggtctgcatggggtaatatctcacttatgaggaaagcatacctgaagaagtgtaaagagttccatcctgacaaaggtggagatgaagagaagatgaaaaagatgaacacactgtataagaaaatggaagatggtgtaaagtatgctcaccagccagattttggaggtttttgggatgccacagagatacctacttatggtacagatgagtgggaacagtggtggaatgcatttaatgaagagaatttgttttgctctgaggaaatgcctagttctgatgatgaggccacagctgactcccagcacagtactccacccaagaaaaagagaaaagtggaagacccaaaggatttcccctctgaactcttgtccttcttgtctcatgcagtgttctcaaataggaccctggcttgctttgctatctacactactaaggagaaggcagctctcttgtacaagaaaatcatggaaaagtattctgtcacctttatttccaggcacaactcctataatcataatattctctttttcttgacaccccataggcatagggtgagtgcaattaacaactatgctcagaagttgtgtactttctccttcctgatctgtaagggtgtgaataaggagtatctcatgtattcagccctgaccagagacccctttagtgtgattgaagaatccctgcctggtgggctcaaggagcatgatttcaacccagaagaggctgaagaaacaaaacaggtgagctggaagcttgtgactgaatatgcaatggagacaaagtgtgatgatgtcctgctcctcctgggaatgtacctggaatttcagtatagctttgaaatgtgtctgaaatgtatcaaaaaggaacagccttctcattataagtatcatgaaaagcactatgccaatgcagctatatttgcagattctaaaaaccagaaaaccatttgtcagcaagctgttgacacagttctggccaagaaaagagtagactctctccagcttaccagggagcagatgttgacaaataggttcaatgaccttctggacagaatggacataatgtttggctcaactggatctgcagatatagaggagtggatggctggagtggcctggctgcactgtctcctccctaaaatggacagtgtagtctatgacttccttaagtgtatggtctataatatccctaaaaagagatactggttgttcaagggacccattgattcagggaaaactacccttgctgctgcacttctggaactctgtggtgggaaagctctcaatgtcaacctgccacttgatagactcaactttgagctgggggtggcaattgatcagtttttggtagtgtttgaagatgtgaaaggtacaggaggagagtccagggatttgcctagtggccaaggcatcaacaatctggacaacctcagagactacctggatgggtctgtaaaggtcaaccttgaaaaaaagcatctcaacaagaggactcaaatatttccacctggaatagtcactatgaatgaatattcagtgcccaagaccctccaggctagatttgtcaagcaaattgatttcagacctaaagattatctgaaacattgtttggagaggagtgagttcctccttgagaaaaggattattcagtcaggaatagcactgcttcttatgctgatatggtatagaccagtggctgagtttgcccaaagcattcagagtagaatagttgagtggaaagaaaggcttgacaaggagttttctctttcagtatatcaaaagatgaagttcaatgtggctatgggtattggagtgcttgattggttgagaaacagtgatgatgatgatgaagattctcaggaaaatgctgataaaaatgaggatgggggagagaagaatatggaagattctggtcatgaaactggcattgatagtcagagccaggggagtttccaggctccacagagctcccaaagtgtccatgaccacaaccagccttaccatatatgcagaggttttacttgtttcaagaaacctcccactccccctccagaacctgaaacatgagcggccgcgactctagatcataatcagccataccacacctccccctgaacctgaaaaatcaatgcaattattgttgaaataaagcacccagcaatgcctgggaccatgtaaaactgtcctggttctttccaaggtatagagcatagcccacaggctgatatttctggccagggttggttggaggacagccttgtctataggaagagaatgaggtttttgcactataagggcatgcaagtcagtcccgcccctaactccacctggttgcccatcccgcccctaactccgcccagttccgcccattctccgccccatggctgactaattttttttatttatgcagaggcggaggccgcctcggcctctgagctattccagaagtagtgaggaggcttttttggaggcccttaattaaattgacatatctacctaatttgtgtataataaccctgataaatgcttcaataatattgaaaaaggaagagtcctgtataaaaagaaccagctgtggaatgtgtgtcagttagtaggcttatgcaaagtagcccgcccaagagacaggctgaggcccgcccaccatgatagaacaagatggacttcatgctggatctcctgcagcatgggtggaaagactttttggttatgattgggctcagcagaccattggatgttctgatgctgctgtgttcaggcttagtgcacagggtaggccagtgctctttgtgaagactgatctctctggagctttgaatgaactgcaggatgaggctgctaggctttcatggctggccaccacaggtgtcccttgtgctgcagtgttggatgtggttactgaggctgggagggattggctcctcctgggagaagtgccaggtcaggatctgttgagttctcacctggctccagctgaaaaagtctccataatggcagatgctatgagaaggctgcacacattggacccagctacatgcccatttgaccatcaggccaaacacaggattgagagggccagaacaagaatggaggctgggttggtggaccaggatgaccttgatgaggagcatcagggcctggctccagctgaattgtttgccaggctcaaggctagtatgcctgatggggaggatctggtggtaactcatggtgatgcctgtttgcctaacatcatggtggaaaatggaaggttctctggattcattgattgtggaagactgggtgtagctgacaggtatcaggacatagctcttgcaacaagggatattgcagaggagttgggtggagaatgggctgacaggttcctggtcttgtatggcattgctgccccagacagccaaagaattgctttctataggctgttggatgagtttttctaagctcagcacccacaaagctctcaggtcctaagagacactggcacccatatccatgcatcccttgtataaataaagcatccagcaaagctggtaccatgtaaaactgtcttggttgtttccaaggtatagagcatagctcaataggtttttgactttgtcccgcccctctaagtcctgcacacagatactccaatatgacatacagcatgcttgggaactgagtgcccccatgtgggcagagagcaccatgtgccacagtccctgagaagttcttgggaagggtgggcaattgccatgtgtgcctagagaaggttgtttgtaatactgccaagtgccatgtggtgtgatattggctccatgtgccttgtttgtaataacatttccatgtgtcttgggaagaaccatatataagcagagctggtttagtgaaccctcagataggcctagaccatggccagcagtgagaatgtcataacagagttcatgagattcaaggtgaggatggagggaactgtcaatggtcatgagtttgagattgaaggggaaggggagggcagaccctatgagggccacaacacagtcaaattgaaggtgaccaaagggggaccccttccctttgcctgggacatcctgagcccacagtttcagtatggttccaaagtttatgtaaagcaccctgctgacatccctgactacaagaaactgtccttcccagaaggattcaagtgggaaagggtcatgaactttgaggatggaggggttgcaacagtgacccaggacagttctctccaagatggctgtttcatctacaaggtaaaattcattggtgtgaactttccctctgatggcccagtgatgcaaaaaaagaccatgggctgggaagcctcaacagaaaggctgtaccctagagatggagttctcaagggtgagacccacaaagctctaaagctcaaagatgggggccactatctggtggagttcaagagcatctacatggcaaaaaagccagtgcagttgcctggctattactatgtggatgccaagcttgacataacctcacacaatgaagactacactattgtggaacagtatgagaggactgagggaagacatcatctgtttctgtgaattcgcactgcatggacttacctgcctggtggtatcagtcacaggctctgataaggattcagctgttgtataaataaagcatgcagcctagcaggaaccatgttaatctctcttggttgtttccttggaatactcctaagcacattaggtttttagatctgtagaaaagatcaaaggatcttcttgagatcctttttttctgcgcgtaatctgctgcttgcaaacaaaaaaaccaccgctaccagcggtggtttgtttgccggatcaagagctaccaactctttttccgaaggtaactggcttcagcagagcgcagataccaaatactgtccttctagtgtagccgtagttaggccaccacttcaagaactctgtagcaccgcctacatacctcgctctgctaatcctgttaccagtggctgctgccagtggcgataagtcgtgtcttaccgggttggactcaagacgatagttaccggataaggcgcagcggtcgggctgaacggggggttcgtgcacacagcccagcttggagcgaacgacctacaccgaactgagatacctacagcgtgagctatgagaaagcgccacgcttcccgaagggagaaaggcggacaggtatccggtaagcggcagggtcggaacaggagagcgcacgagggagcttccagggggaaacgcctggtatctttatagtcctgtcgggtttcgccacctctgacttgagcgtcgatttttgtgatgctcgtcaggggggcggagcctatggaaaaacgccagcaacgcggcctttttacgg

SEQ ID NO: 618 - DNA, 7343 bp, Artificial Sequence
  pCzGFP-I-T(L103P)-BB3
  CDS (1917)...(4040): Large T Antigen
  mutation (2223)...(2224): L103P
ttcctattaatagtaatcaattacggggtcattagttcatagcccatatatggagttccgcgttacataacttacggtaaatggcccgcctggctgaccgcccaacgacccccgcccattgacgtcaataatgacgtatgttcccatagtaacgccaatagggactttccattgacgtcaatgggtggagtatttacggtaaactgcccacttggcagtacatcaagtgtatcatatgccaagtacgccccctattgacgtcaatgacggtaaatggcccgcctggcattatgcccagtacatgaccttatgggactttcctacttggcagtacatctacgtattagtcatcgctattaccatggtgatgcggttttggcagtacatcaatgggcgtggatagcggtttgactcacggggatttccaagtctccaccccattgacgtcaatgggagtttgttttggcaccaaaatcaacgggactttccaaaatgtcgtaacaactccgccccattgacgcaaatgggcggtaggcgtgtacggtgggaggtctatataagcagagctggtttagtgaaccgtcagatccgctagctagaccatggtgagcaagggagaggaactctttacaggtgtggtcccaattctggtggagctggatggagatgtgaatgggcacaaattttctgtcagtggagagggagagggggatgctacctatggcaaactgactctgaagttcatctgcactactggcaagctgcctgtgccatggccaactctggtgacaaccctcacctatggagtccagtgcttttccagatatcctgaccacatgaaacagcatgactttttcaaatctgcaatgcctgagggctatgtgcaagagagaactatctttttcaaggatgatgggaactataagactagggctgaggtgaaatttgaaggagacaccctggtcaataggattgagctcaaggggattgacttcaaggaggatggcaacattctgggccataagctggagtataattacaattcccacaatgtctacattatggctgacaagcagaagaatggcattaaggtcaacttcaagattagacacaacatagaggatggatctgtgcagctggctgaccattaccagcagaatacacctattggggatgggccagtgctgctccctgacaatcactatctgagcacccaatctgctttgtctaaagatcctaatgaaaagagagatcacatggtgctgctggagtttgtaactgctgcaggaattaccttgggtatggatgaactctataagtaaggatccgcccctctccctcccccccccctaacgttactggccgaagccgcttggaataaggccggtgtgcgtttgtctatatgttattttccaccatattgccgtcttttggcaatgtgagggcccggaaacctggccctgtcttcttgacgagcattcctaggggtctttcccctctcgccaaaggaatgcaaggtctgttgaatgtcgtgaaggaagcagttcctctggaagcttcttgaagacaaacaacgtctgtagcgaccctttgcaggcagcggaaccccccacctggcgacaggtgcctctgcggccaaaagccacgtgtataagatacacctgcaaaggcggcacaaccccagtgccacgttgtgagttggatagttgtggaaagagtcaaatggctctcctcaagcgtattcaacaaggggctgaaggatgcccagaaggtaccccattgtatgggatctgatctggggcctcggtgcacatgctttacatgtgtttagtcgaggttaaaaaaacgtctaggccccccgaaccacggggacgtggttttcctttgaaaaacacgatgataatatggccacaaccatggacaaagtgctgaatagggaggaaagtctgcaactgatggatctgttgggacttgagaggtctgcatggggtaatatcccacttatgaggaaagcatacctgaagaagtgtaaagagttccatcctgacaaaggtggagatgaagagaagatgaaaaagatgaacacactgtataagaaaatggaagatggtgtaaagtatgctcaccagccagattttggaggtttttgggatgccacagagatacctacttatggtacagatgagtgggaacagtggtggaatgcatttaatgaagagaatcccttttgctctgaggaaatgcctagttctgatgatgaggccacagctgactcccagcacagtactccacccaagaaaaagagaaaagtggaagacccaaaggatttcccctctgaactcttgtccttcttgtctcatgcagtgttctcaaataggaccctggcttgctttgctatctacactactaaggagaaggcagctctcttgtacaagaaaatcatggaaaagtattctgtcacctttatttccaggcacaactcctataatcataatattctctttttcttgacaccccataggcatagggtgagtgcaattaacaactatgctcagaagttgtgtactttctccttcctgatctgtaagggtgtgaataaggagtatctcatgtattcagccctgaccagagacccctttagtgtgattgaagaatccctgcctggtgggctcaaggagcatgatttcaacccagaagaggctgaagaaacaaaacaggtgagctggaagcttgtgactgaatatgcaatggagacaaagtgtgatgatgtcctgctcctcctgggaatgtacctggaatttcagtatagctttgaaatgtgtctgaaatgtatcaaaaaggaacagccttctcattataagtatcatgaaaagcactatgccaatgcagctatatttgcagattctaaaaaccagaaaaccatttgtcagcaagctgttgacacagttctggccaagaaaagagtagactctctccagcttaccagggagcagatgttgacaaataggttcaatgaccttctggacagaatggacataatgtttggctcaactggatctgcagatatagaggagtggatggctggagtggcctggctgcactgtctcctccctaaaatggacagtgtagtctatgacttccttaagtgtatggtctataatatccctaaaaagagatactggttgttcaagggacccattgattcagggaaaactacccttgctgctgcacttctggaactctgtggtgggaaagctctcaatgtcaacctgccacttgatagactcaactttgagctgggggtggcaattgatcagtttttggtagtgtttgaagatgtgaaaggtacaggaggagagtccagggatttgcctagtggccaaggcatcaacaatctggacaacctcagagactacctggatgggtctgtaaaggtcaaccttgaaaaaaagcatctcaacaagaggactcaaatatttccacctggaatagtcactatgaatgaatattcagtgcccaagaccctccaggctagatttgtcaagcaaattgatttcagacctaaagattatctgaaacattgtttggagaggagtgagttcctccttgagaaaaggattattcagtcaggaatagcactgcttcttatgctgatatggtatagaccagtggctgagtttgcccaaagcattcagagtagaatagttgagtggaaagaaaggcttgacaaggagttttctctttcagtatatcaaaagatgaagttcaatgtggctatgggtattggagtgcttgattggttgagaaacagtgatgatgatgatgaagattctcaggaaaatgctgataaaaatgaggatgggggagagaagaatatggaagattctggtcatgaaactggcattgatagtcagagccaggggagtttccaggctccacagagctcccaaagtgtccatgaccacaaccagccttaccatatatgcagaggttttacttgtttcaagaaacctcccactccccctccagaacctgaaacatgagcggccgcgactctagatcataatcagccataccacacctccccctgaacctgaaaaatcaatgcaattattgttgaaataaagcacccagcaatgcctgggaccatgtaaaactgtcctggttctttccaaggtatagagcatagcccacaggctgatatttctggccagggttggttggaggacagccttgtctataggaagagaatgaggtttttgcactataagggcatgcaagtcagtcccgcccctaactccacctggttgcccatcccgcccctaactccgcccagttccgcccattctccgccccatggctgactaattttttttatttatgcagaggcggaggccgcctcggcctctgagctattccagaagtagtgaggaggcttttttggaggcccttaattaaattgacatatctacctaatttgtgtataataaccctgataaatgcttcaataatattgaaaaaggaagagtcctgtataaaaagaaccagctgtggaatgtgtgtcagttagtaggcttatgcaaagtagcccgcccaagagacaggctgaggcccgcccaccatgatagaacaagatggacttcatgctggatctcctgcagcatgggtggaaagactttttggttatgattgggctcagcagaccattggatgttctgatgctgctgtgttcaggcttagtgcacagggtaggccagtgctctttgtgaagactgatctctctggagctttgaatgaactgcaggatgaggctgctaggctttcatggctggccaccacaggtgtcccttgtgctgcagtgttggatgtggttactgaggctgggagggattggctcctcctgggagaagtgccaggtcaggatctgttgagttctcacctggctccagctgaaaaagtctccataatggcagatgctatgagaaggctgcacacattggacccagctacatgcccatttgaccatcaggccaaacacaggattgagagggccagaacaagaatggaggctgggttggtggaccaggatgaccttgatgaggagcatcagggcctggctccagctgaattgtttgccaggctcaaggctagtatgcctgatggggaggatctggtggtaactcatggtgatgcctgtttgcctaacatcatggtggaaaatggaaggttctctggattcattgattgtggaagactgggtgtagctgacaggtatcaggacatagctcttgcaacaagggatattgcagaggagttgggtggagaatgggctgacaggttcctggtcttgtatggcattgctgccccagacagccaaagaattgctttctataggctgttggatgagtttttctaagctcagcacccacaaagctctcaggtcctaagagacactggcacccatatccatgcatcccttgtataaataaagcatccagcaaagctggtaccatgtaaaactgtcttggttgtttccaaggtatagagcatagctcaataggtttttgactttgtcccgcccctctaagtcctgcacacagatactccaatatgacatacagcatgcttgggaactgagtgcccccatgtgggcagagagcaccatgtgccacagtccctgagaagttcttgggaagggtgggcaattgccatgtgtgcctagagaaggttgtttgtaatactgccaagtgccatgtggtgtgatattggctccatgtgccttgtttgtaataacatttccatgtgtcttgggaagaaccatatataagcagagctggtttagtgaaccctcagataggcctagaccatggccagcagtgagaatgtcataacagagttcatgagattcaaggtgaggatggagggaactgtcaatggtcatgagtttgagattgaaggggaaggggagggcagaccctatgagggccacaacacagtcaaattgaaggtgaccaaagggggaccccttccctttgcctgggacatcctgagcccacagtttcagtatggttccaaagtttatgtaaagcaccctgctgacatccctgactacaagaaactgtccttcccagaaggattcaagtgggaaagggtcatgaactttgaggatggaggggttgcaacagtgacccaggacagttctctccaagatggctgtttcatctacaaggtaaaattcattggtgtgaactttccctctgatggcccagtgatgcaaaaaaagaccatgggctgggaagcctcaacagaaaggctgtaccctagagatggagttctcaagggtgagacccacaaagctctaaagctcaaagatgggggccactatctggtggagttcaagagcatctacatggcaaaaaagccagtgcagttgcctggctattactatgtggatgccaagcttgacataacctcacacaatgaagactacactattgtggaacagtatgagaggactgagggaagacatcatctgtttctgtgaattcgcactgcatggacttacctgcctggtggtatcagtcacaggctctgataaggattcagctgttgtataaataaagcatgcagcctagcaggaaccatgttaatctctcttggttgtttccttggaatactcctaagcacattaggtttttagatctgtagaaaagatcaaaggatcttcttgagatcctttttttctgcgcgtaatctgctgcttgcaaacaaaaaaaccaccgctaccagcggtggtttgtttgccggatcaagagctaccaactctttttccgaaggtaactggcttcagcagagcgcagataccaaatactgtccttctagtgtagccgtagttaggccaccacttcaagaactctgtagcaccgcctacatacctcgctctgctaatcctgttaccagtggctgctgccagtggcgataagtcgtgtcttaccgggttggactcaagacgatagttaccggataaggcgcagcggtcgggctgaacggggggttcgtgcacacagcccagcttggagcgaacgacctacaccgaactgagatacctacagcgtgagctatgagaaagcgccacgcttcccgaagggagaaaggcggacaggtatccggtaagcggcagggtcggaacaggagagcgcacgagggagcttccagggggaaacgcctggtatctttatagtcctgtcgggtttcgccacctctgacttgagcgtcgatttttgtgatgctcgtcaggggggcggagcctatggaaaaacgccagcaacgcggcctttttacgg

SEQ ID NO: 619 - DNA, 7343 bp, Artificial Sequence
  pCzGFP-I-T(C105A)-BB3
  CDS (1917)...(4040): Large T Antigen
  mutation (2229)...(2231): C105A
ttcctattaatagtaatcaattacggggtcattagttcatagcccatatatggagttccgcgttacataacttacggtaaatggcccgcctggctgaccgcccaacgacccccgcccattgacgtcaataatgacgtatgttcccatagtaacgccaatagggactttccattgacgtcaatgggtggagtatttacggtaaactgcccacttggcagtacatcaagtgtatcatatgccaagtacgccccctattgacgtcaatgacggtaaatggcccgcctggcattatgcccagtacatgaccttatgggactttcctacttggcagtacatctacgtattagtcatcgctattaccatggtgatgcggttttggcagtacatcaatgggcgtggatagcggtttgactcacggggatttccaagtctccaccccattgacgtcaatgggagtttgttttggcaccaaaatcaacgggactttccaaaatgtcgtaacaactccgccccattgacgcaaatgggcggtaggcgtgtacggtgggaggtctatataagcagagctggtttagtgaaccgtcagatccgctagctagaccatggtgagcaagggagaggaactctttacaggtgtggtcccaattctggtggagctggatggagatgtgaatgggcacaaattttctgtcagtggagagggagagggggatgctacctatggcaaactgactctgaagttcatctgcactactggcaagctgcctgtgccatggccaactctggtgacaaccctcacctatggagtccagtgcttttccagatatcctgaccacatgaaacagcatgactttttcaaatctgcaatgcctgagggctatgtgcaagagagaactatctttttcaaggatgatgggaactataagactagggctgaggtgaaatttgaaggagacaccctggtcaataggattgagctcaaggggattgacttcaaggaggatggcaacattctgggccataagctggagtataattacaattcccacaatgtctacattatggctgacaagcagaagaatggcattaaggtcaacttcaagattagacacaacatagaggatggatctgtgcagctggctgaccattaccagcagaatacacctattggggatgggccagtgctgctccctgacaatcactatctgagcacccaatctgctttgtctaaagatcctaatgaaaagagagatcacatggtgctgctggagtttgtaactgctgcaggaattaccttgggtatggatgaactctataagtaaggatccgcccctctccctcccccccccctaacgttactggccgaagccgcttggaataaggccggtgtgcgtttgtctatatgttattttccaccatattgccgtcttttggcaatgtgagggcccggaaacctggccctgtcttcttgacgagcattcctaggggtctttcccctctcgccaaaggaatgcaaggtctgttgaatgtcgtgaaggaagcagttcctctggaagcttcttgaagacaaacaacgtctgtagcgaccctttgcaggcagcggaaccccccacctggcgacaggtgcctctgcggccaaaagccacgtgtataagatacacctgcaaaggcggcacaaccccagtgccacgttgtgagttggatagttgtggaaagagtcaaatggctctcctcaagcgtattcaacaaggggctgaaggatgcccagaaggtaccccattgtatgggatctgatctggggcctcggtgcacatgctttacatgtgtttagtcgaggttaaaaaaacgtctaggccccccgaaccacggggacgtggttttcctttgaaaaacacgatgataatatggccacaaccatggacaaagtgctgaatagggaggaaagtctgcaactgatggatctgttgggacttgagaggtctgcatggggtaatatcccacttatgaggaaagcatacctgaagaagtgtaaagagttccatcctgacaaaggtggagatgaagagaagatgaaaaagatgaacacactgtataagaaaatggaagatggtgtaaagtatgctcaccagccagattttggaggtttttgggatgccacagagatacctacttatggtacagatgagtgggaacagtggtggaatgcatttaatgaagagaatttgtttgcctctgaggaaatgcctagttctgatgatgaggccacagctgactcccagcacagtactccacccaagaaaaagagaaaagtggaagacccaaaggatttcccctctgaactcttgtccttcttgtctcatgcagtgttctcaaataggaccctggcttgctttgctatctacactactaaggagaaggcagctctcttgtacaagaaaatcatggaaaagtattctgtcacctttatttccaggcacaactcctataatcataatattctctttttcttgacaccccataggcatagggtgagtgcaattaacaactatgctcagaagttgtgtactttctccttcctgatctgtaagggtgtgaataaggagtatctcatgtattcagccctgaccagagacccctttagtgtgattgaagaatccctgcctggtgggctcaaggagcatgatttcaacccagaagaggctgaagaaacaaaacaggtgagctggaagcttgtgactgaatatgcaatggagacaaagtgtgatgatgtcctgctcctcctgggaatgtacctggaatttcagtatagctttgaaatgtgtctgaaatgtatcaaaaaggaacagccttctcattataagtatcatgaaaagcactatgccaatgcagctatatttgcagattctaaaaaccagaaaaccatttgtcagcaagctgttgacacagttctggccaagaaaagagtagactctctccagcttaccagggagcagatgttgacaaataggttcaatgaccttctggacagaatggacataatgtttggctcaactggatctgcagatatagaggagtggatggctggagtggcctggctgcactgtctcctccctaaaatggacagtgtagtctatgacttccttaagtgtatggtctataatatccctaaaaagagatactggttgttcaagggacccattgattcagggaaaactacccttgctgctgcacttctggaactctgtggtgggaaagctctcaatgtcaacctgccacttgatagactcaactttgagctgggggtggcaattgatcagtttttggtagtgtttgaagatgtgaaaggtacaggaggagagtccagggatttgcctagtggccaaggcatcaacaatctggacaacctcagagactacctggatgggtctgtaaaggtcaaccttgaaaaaaagcatctcaacaagaggactcaaatatttccacctggaatagtcactatgaatgaatattcagtgcccaagaccctccaggctagatttgtcaagcaaattgatttcagacctaaagattatctgaaacattgtttggagaggagtgagttcctccttgagaaaaggattattcagtcaggaatagcactgcttcttatgctgatatggtatagaccagtggctgagtttgcccaaagcattcagagtagaatagttgagtggaaagaaaggcttgacaaggagttttctctttcagtatatcaaaagatgaagttcaatgtggctatgggtattggagtgcttgattggttgagaaacagtgatgatgatgatgaagattctcaggaaaatgctgataaaaatgaggatgggggagagaagaatatggaagattctggtcatgaaactggcattgatagtcagagccaggggagtttccaggctccacagagctcccaaagtgtccatgaccacaaccagccttaccatatatgcagaggttttacttgtttcaagaaacctcccactccccctccagaacctgaaacatgagcggccgcgactctagatcataatcagccataccacacctccccctgaacctgaaaaatcaatgcaattattgttgaaataaagcacccagcaatgcctgggaccatgtaaaactgtcctggttctttccaaggtatagagcatagcccacaggctgatatttctggccagggttggttggaggacagccttgtctataggaagagaatgaggtttttgcactataagggcatgcaagtcagtcccgcccctaactccacctggttgcccatcccgcccctaactccgcccagttccgcccattctccgccccatggctgactaattttttttatttatgcagaggcggaggccgcctcggcctctgagctattccagaagtagtgaggaggcttttttggaggcccttaattaaattgacatatctacctaatttgtgtataataaccctgataaatgcttcaataatattgaaaaaggaagagtcctgtataaaaagaaccagctgtggaatgtgtgtcagttagtaggcttatgcaaagtagcccgcccaagagacaggctgaggcccgcccaccatgatagaacaagatggacttcatgctggatctcctgcagcatgggtggaaagactttttggttatgattgggctcagcagaccattggatgttctgatgctgctgtgttcaggcttagtgcacagggtaggccagtgctctttgtgaagactgatctctctggagctttgaatgaactgcaggatgaggctgctaggctttcatggctggccaccacaggtgtcccttgtgctgcagtgttggatgtggttactgaggctgggagggattggctcctcctgggagaagtgccaggtcaggatctgttgagttctcacctggctccagctgaaaaagtctccataatggcagatgctatgagaaggctgcacacattggacccagctacatgcccatttgaccatcaggccaaacacaggattgagagggccagaacaagaatggaggctgggttggtggaccaggatgaccttgatgaggagcatcagggcctggctccagctgaattgtttgccaggctcaaggctagtatgcctgatggggaggatctggtggtaactcatggtgatgcctgtttgcctaacatcatggtggaaaatggaaggttctctggattcattgattgtggaagactgggtgtagctgacaggtatcaggacatagctcttgcaacaagggatattgcagaggagttgggtggagaatgggctgacaggttcctggtcttgtatggcattgctgccccagacagccaaagaattgctttctataggctgttggatgagtttttctaagctcagcacccacaaagctctcaggtcctaagagacactggcacccatatccatgcatcccttgtataaataaagcatccagcaaagctggtaccatgtaaaactgtcttggttgtttccaaggtatagagcatagctcaataggtttttgactttgtcccgcccctctaagtcctgcacacagatactccaatatgacatacagcatgcttgggaactgagtgcccccatgtgggcagagagcaccatgtgccacagtccctgagaagttcttgggaagggtgggcaattgccatgtgtgcctagagaaggttgtttgtaatactgccaagtgccatgtggtgtgatattggctccatgtgccttgtttgtaataacatttccatgtgtcttgggaagaaccatatataagcagagctggtttagtgaaccctcagataggcctagaccatggccagcagtgagaatgtcataacagagttcatgagattcaaggtgaggatggagggaactgtcaatggtcatgagtttgagattgaaggggaaggggagggcagaccctatgagggccacaacacagtcaaattgaaggtgaccaaagggggaccccttccctttgcctgggacatcctgagcccacagtttcagtatggttccaaagtttatgtaaagcaccctgctgacatccctgactacaagaaactgtccttcccagaaggattcaagtgggaaagggtcatgaactttgaggatggaggggttgcaacagtgacccaggacagttctctccaagatggctgtttcatctacaaggtaaaattcattggtgtgaactttccctctgatggcccagtgatgcaaaaaaagaccatgggctgggaagcctcaacagaaaggctgtaccctagagatggagttctcaagggtgagacccacaaagctctaaagctcaaagatgggggccactatctggtggagttcaagagcatctacatggcaaaaaagccagtgcagttgcctggctattactatgtggatgccaagcttgacataacctcacacaatgaagactacactattgtggaacagtatgagaggactgagggaagacatcatctgtttctgtgaattcgcactgcatggacttacctgcctggtggtatcagtcacaggctctgataaggattcagctgttgtataaataaagcatgcagcctagcaggaaccatgttaatctctcttggttgtttccttggaatactcctaagcacattaggtttttagatctgtagaaaagatcaaaggatcttcttgagatcctttttttctgcgcgtaatctgctgcttgcaaacaaaaaaaccaccgctaccagcggtggtttgtttgccggatcaagagctaccaactctttttccgaaggtaactggcttcagcagagcgcagataccaaatactgtccttctagtgtagccgtagttaggccaccacttcaagaactctgtagcaccgcctacatacctcgctctgctaatcctgttaccagtggctgctgccagtggcgataagtcgtgtcttaccgggttggactcaagacgatagttaccggataaggcgcagcggtcgggctgaacggggggttcgtgcacacagcccagcttggagcgaacgacctacaccgaactgagatacctacagcgtgagctatgagaaagcgccacgcttcccgaagggagaaaggcggacaggtatccggtaagcggcagggtcggaacaggagagcgcacgagggagcttccagggggaaacgcctggtatctttatagtcctgtcgggtttcgccacctctgacttgagcgtcgatttttgtgatgctcgtcaggggggcggagcctatggaaaaacgccagcaacgcggcctttttacgg

SEQ ID NO: 620 - DNA, 7343 bp, Artificial Sequence
  pCzGFP-I-T(E107L)-BB3
  CDS (1917)...(4040): Large T Antigen
  mutation (2235)...(2237): E107L
ttcctattaatagtaatcaattacggggtcattagttcatagcccatatatggagttccgcgttacataacttacggtaaatggcccgcctggctgaccgcccaacgacccccgcccattgacgtcaataatgacgtatgttcccatagtaacgccaatagggactttccattgacgtcaatgggtggagtatttacggtaaactgcccacttggcagtacatcaagtgtatcatatgccaagtacgccccctattgacgtcaatgacggtaaatggcccgcctggcattatgcccagtacatgaccttatgggactttcctacttggcagtacatctacgtattagtcatcgctattaccatggtgatgcggttttggcagtacatcaatgggcgtggatagcggtttgactcacggggatttccaagtctccaccccattgacgtcaatgggagtttgttttggcaccaaaatcaacgggactttccaaaatgtcgtaacaactccgccccattgacgcaaatgggcggtaggcgtgtacggtgggaggtctatataagcagagctggtttagtgaaccgtcagatccgctagctagaccatggtgagcaagggagaggaactctttacaggtgtggtcccaattctggtggagctggatggagatgtgaatgggcacaaattttctgtcagtggagagggagagggggatgctacctatggcaaactgactctgaagttcatctgcactactggcaagctgcctgtgccatggccaactctggtgacaaccctcacctatggagtccagtgcttttccagatatcctgaccacatgaaacagcatgactttttcaaatctgcaatgcctgagggctatgtgcaagagagaactatctttttcaaggatgatgggaactataagactagggctgaggtgaaatttgaaggagacaccctggtcaataggattgagctcaaggggattgacttcaaggaggatggcaacattctgggccataagctggagtataattacaattcccacaatgtctacattatggctgacaagcagaagaatggcattaaggtcaacttcaagattagacacaacatagaggatggatctgtgcagctggctgaccattaccagcagaatacacctattggggatgggccagtgctgctccctgacaatcactatctgagcacccaatctgctttgtctaaagatcctaatgaaaagagagatcacatggtgctgctggagtttgtaactgctgcaggaattaccttgggtatggatgaactctataagtaaggatccgcccctctccctcccccccccctaacgttactggccgaagccgcttggaataaggccggtgtgcgtttgtctatatgttattttccaccatattgccgtcttttggcaatgtgagggcccggaaacctggccctgtcttcttgacgagcattcctaggggtctttcccctctcgccaaaggaatgcaaggtctgttgaatgtcgtgaaggaagcagttcctctggaagcttcttgaagacaaacaacgtctgtagcgaccctttgcaggcagcggaaccccccacctggcgacaggtgcctctgcggccaaaagccacgtgtataagatacacctgcaaaggcggcacaaccccagtgccacgttgtgagttggatagttgtggaaagagtcaaatggctctcctcaagcgtattcaacaaggggctgaaggatgcccagaaggtaccccattgtatgggatctgatctggggcctcggtgcacatgctttacatgtgtttagtcgaggttaaaaaaacgtctaggccccccgaaccacggggacgtggttttcctttgaaaaacacgatgataatatggccacaaccatggacaaagtgctgaatagggaggaaagtctgcaactgatggatctgttgggacttgagaggtctgcatggggtaatatcccacttatgaggaaagcatacctgaagaagtgtaaagagttccatcctgacaaaggtggagatgaagagaagatgaaaaagatgaacacactgtataagaaaatggaagatggtgtaaagtatgctcaccagccagattttggaggtttttgggatgccacagagatacctacttatggtacagatgagtgggaacagtggtggaatgcatttaatgaagagaatttgttttgctctctggaaatgcctagttctgatgatgaggccacagctgactcccagcacagtactccacccaagaaaaagagaaaagtggaagacccaaaggatttcccctctgaactcttgtccttcttgtctcatgcagtgttctcaaataggaccctggcttgctttgctatctacactactaaggagaaggcagctctcttgtacaagaaaatcatggaaaagtattctgtcacctttatttccaggcacaactcctataatcataatattctctttttcttgacaccccataggcatagggtgagtgcaattaacaactatgctcagaagttgtgtactttctccttcctgatctgtaagggtgtgaataaggagtatctcatgtattcagccctgaccagagacccctttagtgtgattgaagaatccctgcctggtgggctcaaggagcatgatttcaacccagaagaggctgaagaaacaaaacaggtgagctggaagcttgtgactgaatatgcaatggagacaaagtgtgatgatgtcctgctcctcctgggaatgtacctggaatttcagtatagctttgaaatgtgtctgaaatgtatcaaaaaggaacagccttctcattataagtatcatgaaaagcactatgccaatgcagctatatttgcagattctaaaaaccagaaaaccatttgtcagcaagctgttgacacagttctggccaagaaaagagtagactctctccagcttaccagggagcagatgttgacaaataggttcaatgaccttctggacagaatggacataatgtttggctcaactggatctgcagatatagaggagtggatggctggagtggcctggctgcactgtctcctccctaaaatggacagtgtagtctatgacttccttaagtgtatggtctataatatccctaaaaagagatactggttgttcaagggacccattgattcagggaaaactacccttgctgctgcacttctggaactctgtggtgggaaagctctcaatgtcaacctgccacttgatagactcaactttgagctgggggtggcaattgatcagtttttggtagtgtttgaagatgtgaaaggtacaggaggagagtccagggatttgcctagtggccaaggcatcaacaatctggacaacctcagagactacctggatgggtctgtaaaggtcaaccttgaaaaaaagcatctcaacaagaggactcaaatatttccacctggaatagtcactatgaatgaatattcagtgcccaagaccctccaggctagatttgtcaagcaaattgatttcagacctaaagattatctgaaacattgtttggagaggagtgagttcctccttgagaaaaggattattcagtcaggaatagcactgcttcttatgctgatatggtatagaccagtggctgagtttgcccaaagcattcagagtagaatagttgagtggaaagaaaggcttgacaaggagttttctctttcagtatatcaaaagatgaagttcaatgtggctatgggtattggagtgcttgattggttgagaaacagtgatgatgatgatgaagattctcaggaaaatgctgataaaaatgaggatgggggagagaagaatatggaagattctggtcatgaaactggcattgatagtcagagccaggggagtttccaggctccacagagctcccaaagtgtccatgaccacaaccagccttaccatatatgcagaggttttacttgtttcaagaaacctcccactccccctccagaacctgaaacatgagcggccgcgactctagatcataatcagccataccacacctccccctgaacctgaaaaatcaatgcaattattgttgaaataaagcacccagcaatgcctgggaccatgtaaaactgtcctggttctttccaaggtatagagcatagcccacaggctgatatttctggccagggttggttggaggacagccttgtctataggaagagaatgaggtttttgcactataagggcatgcaagtcagtcccgcccctaactccacctggttgcccatcccgcccctaactccgcccagttccgcccattctccgccccatggctgactaattttttttatttatgcagaggcggaggccgcctcggcctctgagctattccagaagtagtgaggaggcttttttggaggcccttaattaaattgacatatctacctaatttgtgtataataaccctgataaatgcttcaataatattgaaaaaggaagagtcctgtataaaaagaaccagctgtggaatgtgtgtcagttagtaggcttatgcaaagtagcccgcccaagagacaggctgaggcccgcccaccatgatagaacaagatggacttcatgctggatctcctgcagcatgggtggaaagactttttggttatgattgggctcagcagaccattggatgttctgatgctgctgtgttcaggcttagtgcacagggtaggccagtgctctttgtgaagactgatctctctggagctttgaatgaactgcaggatgaggctgctaggctttcatggctggccaccacaggtgtcccttgtgctgcagtgttggatgtggttactgaggctgggagggattggctcctcctgggagaagtgccaggtcaggatctgttgagttctcacctggctccagctgaaaaagtctccataatggcagatgctatgagaaggctgcacacattggacccagctacatgcccatttgaccatcaggccaaacacaggattgagagggccagaacaagaatggaggctgggttggtggaccaggatgaccttgatgaggagcatcagggcctggctccagctgaattgtttgccaggctcaaggctagtatgcctgatggggaggatctggtggtaactcatggtgatgcctgtttgcctaacatcatggtggaaaatggaaggttctctggattcattgattgtggaagactgggtgtagctgacaggtatcaggacatagctcttgcaacaagggatattgcagaggagttgggtggagaatgggctgacaggttcctggtcttgtatggcattgctgccccagacagccaaagaattgctttctataggctgttggatgagtttttctaagctcagcacccacaaagctctcaggtcctaagagacactggcacccatatccatgcatcccttgtataaataaagcatccagcaaagctggtaccatgtaaaactgtcttggttgtttccaaggtatagagcatagctcaataggtttttgactttgtcccgcccctctaagtcctgcacacagatactccaatatgacatacagcatgcttgggaactgagtgcccccatgtgggcagagagcaccatgtgccacagtccctgagaagttcttgggaagggtgggcaattgccatgtgtgcctagagaaggttgtttgtaatactgccaagtgccatgtggtgtgatattggctccatgtgccttgtttgtaataacatttccatgtgtcttgggaagaaccatatataagcagagctggtttagtgaaccctcagataggcctagaccatggccagcagtgagaatgtcataacagagttcatgagattcaaggtgaggatggagggaactgtcaatggtcatgagtttgagattgaaggggaaggggagggcagaccctatgagggccacaacacagtcaaattgaaggtgaccaaagggggaccccttccctttgcctgggacatcctgagcccacagtttcagtatggttccaaagtttatgtaaagcaccctgctgacatccctgactacaagaaactgtccttcccagaaggattcaagtgggaaagggtcatgaactttgaggatggaggggttgcaacagtgacccaggacagttctctccaagatggctgtttcatctacaaggtaaaattcattggtgtgaactttccctctgatggcccagtgatgcaaaaaaagaccatgggctgggaagcctcaacagaaaggctgtaccctagagatggagttctcaagggtgagacccacaaagctctaaagctcaaagatgggggccactatctggtggagttcaagagcatctacatggcaaaaaagccagtgcagttgcctggctattactatgtggatgccaagcttgacataacctcacacaatgaagactacactattgtggaacagtatgagaggactgagggaagacatcatctgtttctgtgaattcgcactgcatggacttacctgcctggtggtatcagtcacaggctctgataaggattcagctgttgtataaataaagcatgcagcctagcaggaaccatgttaatctctcttggttgtttccttggaatactcctaagcacattaggtttttagatctgtagaaaagatcaaaggatcttcttgagatcctttttttctgcgcgtaatctgctgcttgcaaacaaaaaaaccaccgctaccagcggtggtttgtttgccggatcaagagctaccaactctttttccgaaggtaactggcttcagcagagcgcagataccaaatactgtccttctagtgtagccgtagttaggccaccacttcaagaactctgtagcaccgcctacatacctcgctctgctaatcctgttaccagtggctgctgccagtggcgataagtcgtgtcttaccgggttggactcaagacgatagttaccggataaggcgcagcggtcgggctgaacggggggttcgtgcacacagcccagcttggagcgaacgacctacaccgaactgagatacctacagcgtgagctatgagaaagcgccacgcttcccgaagggagaaaggcggacaggtatccggtaagcggcagggtcggaacaggagagcgcacgagggagcttccagggggaaacgcctggtatctttatagtcctgtcgggtttcgccacctctgacttgagcgtcgatttttgtgatgctcgtcaggggggcggagcctatggaaaaacgccagcaacgcggcctttttacgg

SEQ ID NO: 621 - DNA, 7343 bp, Artificial Sequence
  pCzGFP-I-T(E107K)-BB3
  CDS (1917)...(4040): Large T Antigen (E107K)
  mutation (2235)...(2237): E107K
ttcctattaatagtaatcaattacggggtcattagttcatagcccatatatggagttccgcgttacataacttacggtaaatggcccgcctggctgaccgcccaacgacccccgcccattgacgtcaataatgacgtatgttcccatagtaacgccaatagggactttccattgacgtcaatgggtggagtatttacggtaaactgcccacttggcagtacatcaagtgtatcatatgccaagtacgccccctattgacgtcaatgacggtaaatggcccgcctggcattatgcccagtacatgaccttatgggactttcctacttggcagtacatctacgtattagtcatcgctattaccatggtgatgcggttttggcagtacatcaatgggcgtggatagcggtttgactcacggggatttccaagtctccaccccattgacgtcaatgggagtttgttttggcaccaaaatcaacgggactttccaaaatgtcgtaacaactccgccccattgacgcaaatgggcggtaggcgtgtacggtgggaggtctatataagcagagctggtttagtgaaccgtcagatccgctagctagaccatggtgagcaagggagaggaactctttacaggtgtggtcccaattctggtggagctggatggagatgtgaatgggcacaaattttctgtcagtggagagggagagggggatgctacctatggcaaactgactctgaagttcatctgcactactggcaagctgcctgtgccatggccaactctggtgacaaccctcacctatggagtccagtgcttttccagatatcctgaccacatgaaacagcatgactttttcaaatctgcaatgcctgagggctatgtgcaagagagaactatctttttcaaggatgatgggaactataagactagggctgaggtgaaatttgaaggagacaccctggtcaataggattgagctcaaggggattgacttcaaggaggatggcaacattctgggccataagctggagtataattacaattcccacaatgtctacattatggctgacaagcagaagaatggcattaaggtcaacttcaagattagacacaacatagaggatggatctgtgcagctggctgaccattaccagcagaatacacctattggggatgggccagtgctgctccctgacaatcactatctgagcacccaatctgctttgtctaaagatcctaatgaaaagagagatcacatggtgctgctggagtttgtaactgctgcaggaattaccttgggtatggatgaactctataagtaaggatccgcccctctccctcccccccccctaacgttactggccgaagccgcttggaataaggccggtgtgcgtttgtctatatgttattttccaccatattgccgtcttttggcaatgtgagggcccggaaacctggccctgtcttcttgacgagcattcctaggggtctttcccctctcgccaaaggaatgcaaggtctgttgaatgtcgtgaaggaagcagttcctctggaagcttcttgaagacaaacaacgtctgtagcgaccctttgcaggcagcggaaccccccacctggcgacaggtgcctctgcggccaaaagccacgtgtataagatacacctgcaaaggcggcacaaccccagtgccacgttgtgagttggatagttgtggaaagagtcaaatggctctcctcaagcgtattcaacaaggggctgaaggatgcccagaaggtaccccattgtatgggatctgatctggggcctcggtgcacatgctttacatgtgtttagtcgaggttaaaaaaacgtctaggccccccgaaccacggggacgtggttttcctttgaaaaacacgatgataatatggccacaaccatggacaaagtgctgaatagggaggaaagtctgcaactgatggatctgttgggacttgagaggtctgcatggggtaatatcccacttatgaggaaagcatacctgaagaagtgtaaagagttccatcctgacaaaggtggagatgaagagaagatgaaaaagatgaacacactgtataagaaaatggaagatggtgtaaagtatgctcaccagccagattttggaggtttttgggatgccacagagatacctacttatggtacagatgagtgggaacagtggtggaatgcatttaatgaagagaatttgttttgctctaaggaaatgcctagttctgatgatgaggccacagctgactcccagcacagtactccacccaagaaaaagagaaaagtggaagacccaaaggatttcccctctgaactcttgtccttcttgtctcatgcagtgttctcaaataggaccctggcttgctttgctatctacactactaaggagaaggcagctctcttgtacaagaaaatcatggaaaagtattctgtcacctttatttccaggcacaactcctataatcataatattctctttttcttgacaccccataggcatagggtgagtgcaattaacaactatgctcagaagttgtgtactttctccttcctgatctgtaagggtgtgaataaggagtatctcatgtattcagccctgaccagagacccctttagtgtgattgaagaatccctgcctggtgggctcaaggagcatgatttcaacccagaagaggctgaagaaacaaaacaggtgagctggaagcttgtgactgaatatgcaatggagacaaagtgtgatgatgtcctgctcctcctgggaatgtacctggaatttcagtatagctttgaaatgtgtctgaaatgtatcaaaaaggaacagccttctcattataagtatcatgaaaagcactatgccaatgcagctatatttgcagattctaaaaaccagaaaaccatttgtcagcaagctgttgacacagttctggccaagaaaagagtagactctctccagcttaccagggagcagatgttgacaaataggttcaatgaccttctggacagaatggacataatgtttggctcaactggatctgcagatatagaggagtggatggctggagtggcctggctgcactgtctcctccctaaaatggacagtgtagtctatgacttccttaagtgtatggtctataatatccctaaaaagagatactggttgttcaagggacccattgattcagggaaaactacccttgctgctgcacttctggaactctgtggtgggaaagctctcaatgtcaacctgccacttgatagactcaactttgagctgggggtggcaattgatcagtttttggtagtgtttgaagatgtgaaaggtacaggaggagagtccagggatttgcctagtggccaaggcatcaacaatctggacaacctcagagactacctggatgggtctgtaaaggtcaaccttgaaaaaaagcatctcaacaagaggactcaaatatttccacctggaatagtcactatgaatgaatattcagtgcccaagaccctccaggctagatttgtcaagcaaattgatttcagacctaaagattatctgaaacattgtttggagaggagtgagttcctccttgagaaaaggattattcagtcaggaatagcactgcttcttatgctgatatggtatagaccagtggctgagtttgcccaaagcattcagagtagaatagttgagtggaaagaaaggcttgacaaggagttttctctttcagtatatcaaaagatgaagttcaatgtggctatgggtattggagtgcttgattggttgagaaacagtgatgatgatgatgaagattctcaggaaaatgctgataaaaatgaggatgggggagagaagaatatggaagattctggtcatgaaactggcattgatagtcagagccaggggagtttccaggctccacagagctcccaaagtgtccatgaccacaaccagccttaccatatatgcagaggttttacttgtttcaagaaacctcccactccccctccagaacctgaaacatgagcggccgcgactctagatcataatcagccataccacacctccccctgaacctgaaaaatcaatgcaattattgttgaaataaagcacccagcaatgcctgggaccatgtaaaactgtcctggttctttccaaggtatagagcatagcccacaggctgatatttctggccagggttggttggaggacagccttgtctataggaagagaatgaggtttttgcactataagggcatgcaagtcagtcccgcccctaactccacctggttgcccatcccgcccctaactccgcccagttccgcccattctccgccccatggctgactaattttttttatttatgcagaggcggaggccgcctcggcctctgagctattccagaagtagtgaggaggcttttttggaggcccttaattaaattgacatatctacctaatttgtgtataataaccctgataaatgcttcaataatattgaaaaaggaagagtcctgtataaaaagaaccagctgtggaatgtgtgtcagttagtaggcttatgcaaagtagcccgcccaagagacaggctgaggcccgcccaccatgatagaacaagatggacttcatgctggatctcctgcagcatgggtggaaagactttttggttatgattgggctcagcagaccattggatgttctgatgctgctgtgttcaggcttagtgcacagggtaggccagtgctctttgtgaagactgatctctctggagctttgaatgaactgcaggatgaggctgctaggctttcatggctggccaccacaggtgtcccttgtgctgcagtgttggatgtggttactgaggctgggagggattggctcctcctgggagaagtgccaggtcaggatctgttgagttctcacctggctccagctgaaaaagtctccataatggcagatgctatgagaaggctgcacacattggacccagctacatgcccatttgaccatcaggccaaacacaggattgagagggccagaacaagaatggaggctgggttggtggaccaggatgaccttgatgaggagcatcagggcctggctccagctgaattgtttgccaggctcaaggctagtatgcctgatggggaggatctggtggtaactcatggtgatgcctgtttgcctaacatcatggtggaaaatggaaggttctctggattcattgattgtggaagactgggtgtagctgacaggtatcaggacatagctcttgcaacaagggatattgcagaggagttgggtggagaatgggctgacaggttcctggtcttgtatggcattgctgccccagacagccaaagaattgctttctataggctgttggatgagtttttctaagctcagcacccacaaagctctcaggtcctaagagacactggcacccatatccatgcatcccttgtataaataaagcatccagcaaagctggtaccatgtaaaactgtcttggttgtttccaaggtatagagcatagctcaataggtttttgactttgtcccgcccctctaagtcctgcacacagatactccaatatgacatacagcatgcttgggaactgagtgcccccatgtgggcagagagcaccatgtgccacagtccctgagaagttcttgggaagggtgggcaattgccatgtgtgcctagagaaggttgtttgtaatactgccaagtgccatgtggtgtgatattggctccatgtgccttgtttgtaataacatttccatgtgtcttgggaagaaccatatataagcagagctggtttagtgaaccctcagataggcctagaccatggccagcagtgagaatgtcataacagagttcatgagattcaaggtgaggatggagggaactgtcaatggtcatgagtttgagattgaaggggaaggggagggcagaccctatgagggccacaacacagtcaaattgaaggtgaccaaagggggaccccttccctttgcctgggacatcctgagcccacagtttcagtatggttccaaagtttatgtaaagcaccctgctgacatccctgactacaagaaactgtccttcccagaaggattcaagtgggaaagggtcatgaactttgaggatggaggggttgcaacagtgacccaggacagttctctccaagatggctgtttcatctacaaggtaaaattcattggtgtgaactttccctctgatggcccagtgatgcaaaaaaagaccatgggctgggaagcctcaacagaaaggctgtaccctagagatggagttctcaagggtgagacccacaaagctctaaagctcaaagatgggggccactatctggtggagttcaagagcatctacatggcaaaaaagccagtgcagttgcctggctattactatgtggatgccaagcttgacataacctcacacaatgaagactacactattgtggaacagtatgagaggactgagggaagacatcatctgtttctgtgaattcgcactgcatggacttacctgcctggtggtatcagtcacaggctctgataaggattcagctgttgtataaataaagcatgcagcctagcaggaaccatgttaatctctcttggttgtttccttggaatactcctaagcacattaggtttttagatctgtagaaaagatcaaaggatcttcttgagatcctttttttctgcgcgtaatctgctgcttgcaaacaaaaaaaccaccgctaccagcggtggtttgtttgccggatcaagagctaccaactctttttccgaaggtaactggcttcagcagagcgcagataccaaatactgtccttctagtgtagccgtagttaggccaccacttcaagaactctgtagcaccgcctacatacctcgctctgctaatcctgttaccagtggctgctgccagtggcgataagtcgtgtcttaccgggttggactcaagacgatagttaccggataaggcgcagcggtcgggctgaacggggggttcgtgcacacagcccagcttggagcgaacgacctacaccgaactgagatacctacagcgtgagctatgagaaagcgccacgcttcccgaagggagaaaggcggacaggtatccggtaagcggcagggtcggaacaggagagcgcacgagggagcttccagggggaaacgcctggtatctttatagtcctgtcgggtttcgccacctctgacttgagcgtcgatttttgtgatgctcgtcaggggggcggagcctatggaaaaacgccagcaacgcggcctttttacgg

SEQ ID NO: 622 - DNA, 7343 bp, Artificial Sequence
  pCzGFP-I-T(E108L)-BB3
  CDS (1917)...(4040): Large T Antigen (E108L)
  mutation (2238)...(2240): E108L
ttcctattaatagtaatcaattacggggtcattagttcatagcccatatatggagttccgcgttacataacttacggtaaatggcccgcctggctgaccgcccaacgacccccgcccattgacgtcaataatgacgtatgttcccatagtaacgccaatagggactttccattgacgtcaatgggtggagtatttacggtaaactgcccacttggcagtacatcaagtgtatcatatgccaagtacgccccctattgacgtcaatgacggtaaatggcccgcctggcattatgcccagtacatgaccttatgggactttcctacttggcagtacatctacgtattagtcatcgctattaccatggtgatgcggttttggcagtacatcaatgggcgtggatagcggtttgactcacggggatttccaagtctccaccccattgacgtcaatgggagtttgttttggcaccaaaatcaacgggactttccaaaatgtcgtaacaactccgccccattgacgcaaatgggcggtaggcgtgtacggtgggaggtctatataagcagagctggtttagtgaaccgtcagatccgctagctagaccatggtgagcaagggagaggaactctttacaggtgtggtcccaattctggtggagctggatggagatgtgaatgggcacaaattttctgtcagtggagagggagagggggatgctacctatggcaaactgactctgaagttcatctgcactactggcaagctgcctgtgccatggccaactctggtgacaaccctcacctatggagtccagtgcttttccagatatcctgaccacatgaaacagcatgactttttcaaatctgcaatgcctgagggctatgtgcaagagagaactatctttttcaaggatgatgggaactataagactagggctgaggtgaaatttgaaggagacaccctggtcaataggattgagctcaaggggattgacttcaaggaggatggcaacattctgggccataagctggagtataattacaattcccacaatgtctacattatggctgacaagcagaagaatggcattaaggtcaacttcaagattagacacaacatagaggatggatctgtgcagctggctgaccattaccagcagaatacacctattggggatgggccagtgctgctccctgacaatcactatctgagcacccaatctgctttgtctaaagatcctaatgaaaagagagatcacatggtgctgctggagtttgtaactgctgcaggaattaccttgggtatggatgaactctataagtaaggatccgcccctctccctcccccccccctaacgttactggccgaagccgcttggaataaggccggtgtgcgtttgtctatatgttattttccaccatattgccgtcttttggcaatgtgagggcccggaaacctggccctgtcttcttgacgagcattcctaggggtctttcccctctcgccaaaggaatgcaaggtctgttgaatgtcgtgaaggaagcagttcctctggaagcttcttgaagacaaacaacgtctgtagcgaccctttgcaggcagcggaaccccccacctggcgacaggtgcctctgcggccaaaagccacgtgtataagatacacctgcaaaggcggcacaaccccagtgccacgttgtgagttggatagttgtggaaagagtcaaatggctctcctcaagcgtattcaacaaggggctgaaggatgcccagaaggtaccccattgtatgggatctgatctggggcctcggtgcacatgctttacatgtgtttagtcgaggttaaaaaaacgtctaggccccccgaaccacggggacgtggttttcctttgaaaaacacgatgataatatggccacaaccatggacaaagtgctgaatagggaggaaagtctgcaactgatggatctgttgggacttgagaggtctgcatggggtaatatcccacttatgaggaaagcatacctgaagaagtgtaaagagttccatcctgacaaaggtggagatgaagagaagatgaaaaagatgaacacactgtataagaaaatggaagatggtgtaaagtatgctcaccagccagattttggaggtttttgggatgccacagagatacctacttatggtacagatgagtgggaacagtggtggaatgcatttaatgaagagaatttgttttgctctgagttaatgcctagttctgatgatgaggccacagctgactcccagcacagtactccacccaagaaaaagagaaaagtggaagacccaaaggatttcccctctgaactcttgtccttcttgtctcatgcagtgttctcaaataggaccctggcttgctttgctatctacactactaaggagaaggcagctctcttgtacaagaaaatcatggaaaagtattctgtcacctttatttccaggcacaactcctataatcataatattctctttttcttgacaccccataggcatagggtgagtgcaattaacaactatgctcagaagttgtgtactttctccttcctgatctgtaagggtgtgaataaggagtatctcatgtattcagccctgaccagagacccctttagtgtgattgaagaatccctgcctggtgggctcaaggagcatgatttcaacccagaagaggctgaagaaacaaaacaggtgagctggaagcttgtgactgaatatgcaatggagacaaagtgtgatgatgtcctgctcctcctgggaatgtacctggaatttcagtatagctttgaaatgtgtctgaaatgtatcaaaaaggaacagccttctcattataagtatcatgaaaagcactatgccaatgcagctatatttgcagattctaaaaaccagaaaaccatttgtcagcaagctgttgacacagttctggccaagaaaagagtagactctctccagcttaccagggagcagatgttgacaaataggttcaatgaccttctggacagaatggacataatgtttggctcaactggatctgcagatatagaggagtggatggctggagtggcctggctgcactgtctcctccctaaaatggacagtgtagtctatgacttccttaagtgtatggtctataatatccctaaaaagagatactggttgttcaagggacccattgattcagggaaaactacccttgctgctgcacttctggaactctgtggtgggaaagctctcaatgtcaacctgccacttgatagactcaactttgagctgggggtggcaattgatcagtttttggtagtgtttgaagatgtgaaaggtacaggaggagagtccagggatttgcctagtggccaaggcatcaacaatctggacaacctcagagactacctggatgggtctgtaaaggtcaaccttgaaaaaaagcatctcaacaagaggactcaaatatttccacctggaatagtcactatgaatgaatattcagtgcccaagaccctccaggctagatttgtcaagcaaattgatttcagacctaaagattatctgaaacattgtttggagaggagtgagttcctccttgagaaaaggattattcagtcaggaatagcactgcttcttatgctgatatggtatagaccagtggctgagtttgcccaaagcattcagagtagaatagttgagtggaaagaaaggcttgacaaggagttttctctttcagtatatcaaaagatgaagttcaatgtggctatgggtattggagtgcttgattggttgagaaacagtgatgatgatgatgaagattctcaggaaaatgctgataaaaatgaggatgggggagagaagaatatggaagattctggtcatgaaactggcattgatagtcagagccaggggagtttccaggctccacagagctcccaaagtgtccatgaccacaaccagccttaccatatatgcagaggttttacttgtttcaagaaacctcccactccccctccagaacctgaaacatgagcggccgcgactctagatcataatcagccataccacacctccccctgaacctgaaaaatcaatgcaattattgttgaaataaagcacccagcaatgcctgggaccatgtaaaactgtcctggttctttccaaggtatagagcatagcccacaggctgatatttctggccagggttggttggaggacagccttgtctataggaagagaatgaggtttttgcactataagggcatgcaagtcagtcccgcccctaactccacctggttgcccatcccgcccctaactccgcccagttccgcccattctccgccccatggctgactaattttttttatttatgcagaggcggaggccgcctcggcctctgagctattccagaagtagtgaggaggcttttttggaggcccttaattaaattgacatatctacctaatttgtgtataataaccctgataaatgcttcaataatattgaaaaaggaagagtcctgtataaaaagaaccagctgtggaatgtgtgtcagttagtaggcttatgcaaagtagcccgcccaagagacaggctgaggcccgcccaccatgatagaacaagatggacttcatgctggatctcctgcagcatgggtggaaagactttttggttatgattgggctcagcagaccattggatgttctgatgctgctgtgttcaggcttagtgcacagggtaggccagtgctctttgtgaagactgatctctctggagctttgaatgaactgcaggatgaggctgctaggctttcatggctggccaccacaggtgtcccttgtgctgcagtgttggatgtggttactgaggctgggagggattggctcctcctgggagaagtgccaggtcaggatctgttgagttctcacctggctccagctgaaaaagtctccataatggcagatgctatgagaaggctgcacacattggacccagctacatgcccatttgaccatcaggccaaacacaggattgagagggccagaacaagaatggaggctgggttggtggaccaggatgaccttgatgaggagcatcagggcctggctccagctgaattgtttgccaggctcaaggctagtatgcctgatggggaggatctggtggtaactcatggtgatgcctgtttgcctaacatcatggtggaaaatggaaggttctctggattcattgattgtggaagactgggtgtagctgacaggtatcaggacatagctcttgcaacaagggatattgcagaggagttgggtggagaatgggctgacaggttcctggtcttgtatggcattgctgccccagacagccaaagaattgctttctataggctgttggatgagtttttctaagctcagcacccacaaagctctcaggtcctaagagacactggcacccatatccatgcatcccttgtataaataaagcatccagcaaagctggtaccatgtaaaactgtcttggttgtttccaaggtatagagcatagctcaataggtttttgactttgtcccgcccctctaagtcctgcacacagatactccaatatgacatacagcatgcttgggaactgagtgcccccatgtgggcagagagcaccatgtgccacagtccctgagaagttcttgggaagggtgggcaattgccatgtgtgcctagagaaggttgtttgtaatactgccaagtgccatgtggtgtgatattggctccatgtgccttgtttgtaataacatttccatgtgtcttgggaagaaccatatataagcagagctggtttagtgaaccctcagataggcctagaccatggccagcagtgagaatgtcataacagagttcatgagattcaaggtgaggatggagggaactgtcaatggtcatgagtttgagattgaaggggaaggggagggcagaccctatgagggccacaacacagtcaaattgaaggtgaccaaagggggaccccttccctttgcctgggacatcctgagcccacagtttcagtatggttccaaagtttatgtaaagcaccctgctgacatccctgactacaagaaactgtccttcccagaaggattcaagtgggaaagggtcatgaactttgaggatggaggggttgcaacagtgacccaggacagttctctccaagatggctgtttcatctacaaggtaaaattcattggtgtgaactttccctctgatggcccagtgatgcaaaaaaagaccatgggctgggaagcctcaacagaaaggctgtaccctagagatggagttctcaagggtgagacccacaaagctctaaagctcaaagatgggggccactatctggtggagttcaagagcatctacatggcaaaaaagccagtgcagttgcctggctattactatgtggatgccaagcttgacataacctcacacaatgaagactacactattgtggaacagtatgagaggactgagggaagacatcatctgtttctgtgaattcgcactgcatggacttacctgcctggtggtatcagtcacaggctctgataaggattcagctgttgtataaataaagcatgcagcctagcaggaaccatgttaatctctcttggttgtttccttggaatactcctaagcacattaggtttttagatctgtagaaaagatcaaaggatcttcttgagatcctttttttctgcgcgtaatctgctgcttgcaaacaaaaaaaccaccgctaccagcggtggtttgtttgccggatcaagagctaccaactctttttccgaaggtaactggcttcagcagagcgcagataccaaatactgtccttctagtgtagccgtagttaggccaccacttcaagaactctgtagcaccgcctacatacctcgctctgctaatcctgttaccagtggctgctgccagtggcgataagtcgtgtcttaccgggttggactcaagacgatagttaccggataaggcgcagcggtcgggctgaacggggggttcgtgcacacagcccagcttggagcgaacgacctacaccgaactgagatacctacagcgtgagctatgagaaagcgccacgcttcccgaagggagaaaggcggacaggtatccggtaagcggcagggtcggaacaggagagcgcacgagggagcttccagggggaaacgcctggtatctttatagtcctgtcgggtttcgccacctctgacttgagcgtcgatttttgtgatgctcgtcaggggggcggagcctatggaaaaacgccagcaacgcggcctttttacgg

SEQ ID NO: 623 - DNA, 7343 bp, Artificial Sequence
  pCzGFP-I-T(S112N)-BB3
  CDS (1917)...(4040)
ttcctattaatagtaatcaattacggggtcattagttcatagcccatatatggagttccgcgttacataacttacggtaaatggcccgcctggctgaccgcccaacgacccccgcccattgacgtcaataatgacgtatgttcccatagtaacgccaatagggactttccattgacgtcaatgggtggagtatttacggtaaactgcccacttggcagtacatcaagtgtatcatatgccaagtacgccccctattgacgtcaatgacggtaaatggcccgcctggcattatgcccagtacatgaccttatgggactttcctacttggcagtacatctacgtattagtcatcgctattaccatggtgatgcggttttggcagtacatcaatgggcgtggatagcggtttgactcacggggatttccaagtctccaccccattgacgtcaatgggagtttgttttggcaccaaaatcaacgggactttccaaaatgtcgtaacaactccgccccattgacgcaaatgggcggtaggcgtgtacggtgggaggtctatataagcagagctggtttagtgaaccgtcagatccgctagctagaccatggtgagcaagggagaggaactctttacaggtgtggtcccaattctggtggagctggatggagatgtgaatgggcacaaattttctgtcagtggagagggagagggggatgctacctatggcaaactgactctgaagttcatctgcactactggcaagctgcctgtgccatggccaactctggtgacaaccctcacctatggagtccagtgcttttccagatatcctgaccacatgaaacagcatgactttttcaaatctgcaatgcctgagggctatgtgcaagagagaactatctttttcaaggatgatgggaactataagactagggctgaggtgaaatttgaaggagacaccctggtcaataggattgagctcaaggggattgacttcaaggaggatggcaacattctgggccataagctggagtataattacaattcccacaatgtctacattatggctgacaagcagaagaatggcattaaggtcaacttcaagattagacacaacatagaggatggatctgtgcagctggctgaccattaccagcagaatacacctattggggatgggccagtgctgctccctgacaatcactatctgagcacccaatctgctttgtctaaagatcctaatgaaaagagagatcacatggtgctgctggagtttgtaactgctgcaggaattaccttgggtatggatgaactctataagtaaggatccgcccctctccctcccccccccctaacgttactggccgaagccgcttggaataaggccggtgtgcgtttgtctatatgttattttccaccatattgccgtcttttggcaatgtgagggcccggaaacctggccctgtcttcttgacgagcattcctaggggtctttcccctctcgccaaaggaatgcaaggtctgttgaatgtcgtgaaggaagcagttcctctggaagcttcttgaagacaaacaacgtctgtagcgaccctttgcaggcagcggaaccccccacctggcgacaggtgcctctgcggccaaaagccacgtgtataagatacacctgcaaaggcggcacaaccccagtgccacgttgtgagttggatagttgtggaaagagtcaaatggctctcctcaagcgtattcaacaaggggctgaaggatgcccagaaggtaccccattgtatgggatctgatctggggcctcggtgcacatgctttacatgtgtttagtcgaggttaaaaaaacgtctaggccccccgaaccacggggacgtggttttcctttgaaaaacacgatgataatatggccacaaccatggacaaagtgctgaatagggaggaaagtctgcaactgatggatctgttgggacttgagaggtctgcatggggtaatatcccacttatgaggaaagcatacctgaagaagtgtaaagagttccatcctgacaaaggtggagatgaagagaagatgaaaaagatgaacacactgtataagaaaatggaagatggtgtaaagtatgctcaccagccagattttggaggtttttgggatgccacagagatacctacttatggtacagatgagtgggaacagtggtggaatgcatttaatgaagagaatttgttttgctctgaggaaatgcctagtaatgatgatgaggccacagctgactcccagcacagtactccacccaagaaaaagagaaaagtggaagacccaaaggatttcccctctgaactcttgtccttcttgtctcatgcagtgttctcaaataggaccctggcttgctttgctatctacactactaaggagaaggcagctctcttgtacaagaaaatcatggaaaagtattctgtcacctttatttccaggcacaactcctataatcataatattctctttttcttgacaccccataggcatagggtgagtgcaattaacaactatgctcagaagttgtgtactttctccttcctgatctgtaagggtgtgaataaggagtatctcatgtattcagccctgaccagagacccctttagtgtgattgaagaatccctgcctggtgggctcaaggagcatgatttcaacccagaagaggctgaagaaacaaaacaggtgagctggaagcttgtgactgaatatgcaatggagacaaagtgtgatgatgtcctgctcctcctgggaatgtacctggaatttcagtatagctttgaaatgtgtctgaaatgtatcaaaaaggaacagccttctcattataagtatcatgaaaagcactatgccaatgcagctatatttgcagattctaaaaaccagaaaaccatttgtcagcaagctgttgacacagttctggccaagaaaagagtagactctctccagcttaccagggagcagatgttgacaaataggttcaatgaccttctggacagaatggacataatgtttggctcaactggatctgcagatatagaggagtggatggctggagtggcctggctgcactgtctcctccctaaaatggacagtgtagtctatgacttccttaagtgtatggtctataatatccctaaaaagagatactggttgttcaagggacccattgattcagggaaaactacccttgctgctgcacttctggaactctgtggtgggaaagctctcaatgtcaacctgccacttgatagactcaactttgagctgggggtggcaattgatcagtttttggtagtgtttgaagatgtgaaaggtacaggaggagagtccagggatttgcctagtggccaaggcatcaacaatctggacaacctcagagactacctggatgggtctgtaaaggtcaaccttgaaaaaaagcatctcaacaagaggactcaaatatttccacctggaatagtcactatgaatgaatattcagtgcccaagaccctccaggctagatttgtcaagcaaattgatttcagacctaaagattatctgaaacattgtttggagaggagtgagttcctccttgagaaaaggattattcagtcaggaatagcactgcttcttatgctgatatggtatagaccagtggctgagtttgcccaaagcattcagagtagaatagttgagtggaaagaaaggcttgacaaggagttttctctttcagtatatcaaaagatgaagttcaatgtggctatgggtattggagtgcttgattggttgagaaacagtgatgatgatgatgaagattctcaggaaaatgctgataaaaatgaggatgggggagagaagaatatggaagattctggtcatgaaactggcattgatagtcagagccaggggagtttccaggctccacagagctcccaaagtgtccatgaccacaaccagccttaccatatatgcagaggttttacttgtttcaagaaacctcccactccccctccagaacctgaaacatgagcggccgcgactctagatcataatcagccataccacacctccccctgaacctgaaaaatcaatgcaattattgttgaaataaagcacccagcaatgcctgggaccatgtaaaactgtcctggttctttccaaggtatagagcatagcccacaggctgatatttctggccagggttggttggaggacagccttgtctataggaagagaatgaggtttttgcactataagggcatgcaagtcagtcccgcccctaactccacctggttgcccatcccgcccctaactccgcccagttccgcccattctccgccccatggctgactaattttttttatttatgcagaggcggaggccgcctcggcctctgagctattccagaagtagtgaggaggcttttttggaggcccttaattaaattgacatatctacctaatttgtgtataataaccctgataaatgcttcaataatattgaaaaaggaagagtcctgtataaaaagaaccagctgtggaatgtgtgtcagttagtaggcttatgcaaagtagcccgcccaagagacaggctgaggcccgcccaccatgatagaacaagatggacttcatgctggatctcctgcagcatgggtggaaagactttttggttatgattgggctcagcagaccattggatgttctgatgctgctgtgttcaggcttagtgcacagggtaggccagtgctctttgtgaagactgatctctctggagctttgaatgaactgcaggatgaggctgctaggctttcatggctggccaccacaggtgtcccttgtgctgcagtgttggatgtggttactgaggctgggagggattggctcctcctgggagaagtgccaggtcaggatctgttgagttctcacctggctccagctgaaaaagtctccataatggcagatgctatgagaaggctgcacacattggacccagctacatgcccatttgaccatcaggccaaacacaggattgagagggccagaacaagaatggaggctgggttggtggaccaggatgaccttgatgaggagcatcagggcctggctccagctgaattgtttgccaggctcaaggctagtatgcctgatggggaggatctggtggtaactcatggtgatgcctgtttgcctaacatcatggtggaaaatggaaggttctctggattcattgattgtggaagactgggtgtagctgacaggtatcaggacatagctcttgcaacaagggatattgcagaggagttgggtggagaatgggctgacaggttcctggtcttgtatggcattgctgccccagacagccaaagaattgctttctataggctgttggatgagtttttctaagctcagcacccacaaagctctcaggtcctaagagacactggcacccatatccatgcatcccttgtataaataaagcatccagcaaagctggtaccatgtaaaactgtcttggttgtttccaaggtatagagcatagctcaataggtttttgactttgtcccgcccctctaagtcctgcacacagatactccaatatgacatacagcatgcttgggaactgagtgcccccatgtgggcagagagcaccatgtgccacagtccctgagaagttcttgggaagggtgggcaattgccatgtgtgcctagagaaggttgtttgtaatactgccaagtgccatgtggtgtgatattggctccatgtgccttgtttgtaataacatttccatgtgtcttgggaagaaccatatataagcagagctggtttagtgaaccctcagataggcctagaccatggccagcagtgagaatgtcataacagagttcatgagattcaaggtgaggatggagggaactgtcaatggtcatgagtttgagattgaaggggaaggggagggcagaccctatgagggccacaacacagtcaaattgaaggtgaccaaagggggaccccttccctttgcctgggacatcctgagcccacagtttcagtatggttccaaagtttatgtaaagcaccctgctgacatccctgactacaagaaactgtccttcccagaaggattcaagtgggaaagggtcatgaactttgaggatggaggggttgcaacagtgacccaggacagttctctccaagatggctgtttcatctacaaggtaaaattcattggtgtgaactttccctctgatggcccagtgatgcaaaaaaagaccatgggctgggaagcctcaacagaaaggctgtaccctagagatggagttctcaagggtgagacccacaaagctctaaagctcaaagatgggggccactatctggtggagttcaagagcatctacatggcaaaaaagccagtgcagttgcctggctattactatgtggatgccaagcttgacataacctcacacaatgaagactacactattgtggaacagtatgagaggactgagggaagacatcatctgtttctgtgaattcgcactgcatggacttacctgcctggtggtatcagtcacaggctctgataaggattcagctgttgtataaataaagcatgcagcctagcaggaaccatgttaatctctcttggttgtttccttggaatactcctaagcacattaggtttttagatctgtagaaaagatcaaaggatcttcttgagatcctttttttctgcgcgtaatctgctgcttgcaaacaaaaaaaccaccgctaccagcggtggtttgtttgccggatcaagagctaccaactctttttccgaaggtaactggcttcagcagagcgcagataccaaatactgtccttctagtgtagccgtagttaggccaccacttcaagaactctgtagcaccgcctacatacctcgctctgctaatcctgttaccagtggctgctgccagtggcgataagtcgtgtcttaccgggttggactcaagacgatagttaccggataaggcgcagcggtcgggctgaacggggggttcgtgcacacagcccagcttggagcgaacgacctacaccgaactgagatacctacagcgtgagctatgagaaagcgccacgcttcccgaagggagaaaggcggacaggtatccggtaagcggcagggtcggaacaggagagcgcacgagggagcttccagggggaaacgcctggtatctttatagtcctgtcgggtttcgccacctctgacttgagcgtcgatttttgtgatgctcgtcaggggggcggagcctatggaaaaacgccagcaacgcggcctttttacgg

SEQ ID NO: 624 - DNA, 7343 bp, Artificial Sequence
  pCzGFP-I-T(S189N)-BB3
  CDS (1917)...(4040): Large T Antigen
ttcctattaatagtaatcaattacggggtcattagttcatagcccatatatggagttccgcgttacataacttacggtaaatggcccgcctggctgaccgcccaacgacccccgcccattgacgtcaataatgacgtatgttcccatagtaacgccaatagggactttccattgacgtcaatgggtggagtatttacggtaaactgcccacttggcagtacatcaagtgtatcatatgccaagtacgccccctattgacgtcaatgacggtaaatggcccgcctggcattatgcccagtacatgaccttatgggactttcctacttggcagtacatctacgtattagtcatcgctattaccatggtgatgcggttttggcagtacatcaatgggcgtggatagcggtttgactcacggggatttccaagtctccaccccattgacgtcaatgggagtttgttttggcaccaaaatcaacgggactttccaaaatgtcgtaacaactccgccccattgacgcaaatgggcggtaggcgtgtacggtgggaggtctatataagcagagctggtttagtgaaccgtcagatccgctagctagaccatggtgagcaagggagaggaactctttacaggtgtggtcccaattctggtggagctggatggagatgtgaatgggcacaaattttctgtcagtggagagggagagggggatgctacctatggcaaactgactctgaagttcatctgcactactggcaagctgcctgtgccatggccaactctggtgacaaccctcacctatggagtccagtgcttttccagatatcctgaccacatgaaacagcatgactttttcaaatctgcaatgcctgagggctatgtgcaagagagaactatctttttcaaggatgatgggaactataagactagggctgaggtgaaatttgaaggagacaccctggtcaataggattgagctcaaggggattgacttcaaggaggatggcaacattctgggccataagctggagtataattacaattcccacaatgtctacattatggctgacaagcagaagaatggcattaaggtcaacttcaagattagacacaacatagaggatggatctgtgcagctggctgaccattaccagcagaatacacctattggggatgggccagtgctgctccctgacaatcactatctgagcacccaatctgctttgtctaaagatcctaatgaaaagagagatcacatggtgctgctggagtttgtaactgctgcaggaattaccttgggtatggatgaactctataagtaaggatccgcccctctccctcccccccccctaacgttactggccgaagccgcttggaataaggccggtgtgcgtttgtctatatgttattttccaccatattgccgtcttttggcaatgtgagggcccggaaacctggccctgtcttcttgacgagcattcctaggggtctttcccctctcgccaaaggaatgcaaggtctgttgaatgtcgtgaaggaagcagttcctctggaagcttcttgaagacaaacaacgtctgtagcgaccctttgcaggcagcggaaccccccacctggcgacaggtgcctctgcggccaaaagccacgtgtataagatacacctgcaaaggcggcacaaccccagtgccacgttgtgagttggatagttgtggaaagagtcaaatggctctcctcaagcgtattcaacaaggggctgaaggatgcccagaaggtaccccattgtatgggatctgatctggggcctcggtgcacatgctttacatgtgtttagtcgaggttaaaaaaacgtctaggccccccgaaccacggggacgtggttttcctttgaaaaacacgatgataatatggccacaaccatggacaaagtgctgaatagggaggaaagtctgcaactgatggatctgttgggacttgagaggtctgcatggggtaatatcccacttatgaggaaagcatacctgaagaagtgtaaagagttccatcctgacaaaggtggagatgaagagaagatgaaaaagatgaacacactgtataagaaaatggaagatggtgtaaagtatgctcaccagccagattttggaggtttttgggatgccacagagatacctacttatggtacagatgagtgggaacagtggtggaatgcatttaatgaagagaatttgttttgctctgaggaaatgcctagttctgatgatgaggccacagctgactcccagcacagtactccacccaagaaaaagagaaaagtggaagacccaaaggatttcccctctgaactcttgtccttcttgtctcatgcagtgttctcaaataggaccctggcttgctttgctatctacactactaaggagaaggcagctctcttgtacaagaaaatcatggaaaagtattctgtcacctttatttccaggcacaacaactataatcataatattctctttttcttgacaccccataggcatagggtgagtgcaattaacaactatgctcagaagttgtgtactttctccttcctgatctgtaagggtgtgaataaggagtatctcatgtattcagccctgaccagagacccctttagtgtgattgaagaatccctgcctggtgggctcaaggagcatgatttcaacccagaagaggctgaagaaacaaaacaggtgagctggaagcttgtgactgaatatgcaatggagacaaagtgtgatgatgtcctgctcctcctgggaatgtacctggaatttcagtatagctttgaaatgtgtctgaaatgtatcaaaaaggaacagccttctcattataagtatcatgaaaagcactatgccaatgcagctatatttgcagattctaaaaaccagaaaaccatttgtcagcaagctgttgacacagttctggccaagaaaagagtagactctctccagcttaccagggagcagatgttgacaaataggttcaatgaccttctggacagaatggacataatgtttggctcaactggatctgcagatatagaggagtggatggctggagtggcctggctgcactgtctcctccctaaaatggacagtgtagtctatgacttccttaagtgtatggtctataatatccctaaaaagagatactggttgttcaagggacccattgattcagggaaaactacccttgctgctgcacttctggaactctgtggtgggaaagctctcaatgtcaacctgccacttgatagactcaactttgagctgggggtggcaattgatcagtttttggtagtgtttgaagatgtgaaaggtacaggaggagagtccagggatttgcctagtggccaaggcatcaacaatctggacaacctcagagactacctggatgggtctgtaaaggtcaaccttgaaaaaaagcatctcaacaagaggactcaaatatttccacctggaatagtcactatgaatgaatattcagtgcccaagaccctccaggctagatttgtcaagcaaattgatttcagacctaaagattatctgaaacattgtttggagaggagtgagttcctccttgagaaaaggattattcagtcaggaatagcactgcttcttatgctgatatggtatagaccagtggctgagtttgcccaaagcattcagagtagaatagttgagtggaaagaaaggcttgacaaggagttttctctttcagtatatcaaaagatgaagttcaatgtggctatgggtattggagtgcttgattggttgagaaacagtgatgatgatgatgaagattctcaggaaaatgctgataaaaatgaggatgggggagagaagaatatggaagattctggtcatgaaactggcattgatagtcagagccaggggagtttccaggctccacagagctcccaaagtgtccatgaccacaaccagccttaccatatatgcagaggttttacttgtttcaagaaacctcccactccccctccagaacctgaaacatgagcggccgcgactctagatcataatcagccataccacacctccccctgaacctgaaaaatcaatgcaattattgttgaaataaagcacccagcaatgcctgggaccatgtaaaactgtcctggttctttccaaggtatagagcatagcccacaggctgatatttctggccagggttggttggaggacagccttgtctataggaagagaatgaggtttttgcactataagggcatgcaagtcagtcccgcccctaactccacctggttgcccatcccgcccctaactccgcccagttccgcccattctccgccccatggctgactaattttttttatttatgcagaggcggaggccgcctcggcctctgagctattccagaagtagtgaggaggcttttttggaggcccttaattaaattgacatatctacctaatttgtgtataataaccctgataaatgcttcaataatattgaaaaaggaagagtcctgtataaaaagaaccagctgtggaatgtgtgtcagttagtaggcttatgcaaagtagcccgcccaagagacaggctgaggcccgcccaccatgatagaacaagatggacttcatgctggatctcctgcagcatgggtggaaagactttttggttatgattgggctcagcagaccattggatgttctgatgctgctgtgttcaggcttagtgcacagggtaggccagtgctctttgtgaagactgatctctctggagctttgaatgaactgcaggatgaggctgctaggctttcatggctggccaccacaggtgtcccttgtgctgcagtgttggatgtggttactgaggctgggagggattggctcctcctgggagaagtgccaggtcaggatctgttgagttctcacctggctccagctgaaaaagtctccataatggcagatgctatgagaaggctgcacacattggacccagctacatgcccatttgaccatcaggccaaacacaggattgagagggccagaacaagaatggaggctgggttggtggaccaggatgaccttgatgaggagcatcagggcctggctccagctgaattgtttgccaggctcaaggctagtatgcctgatggggaggatctggtggtaactcatggtgatgcctgtttgcctaacatcatggtggaaaatggaaggttctctggattcattgattgtggaagactgggtgtagctgacaggtatcaggacatagctcttgcaacaagggatattgcagaggagttgggtggagaatgggctgacaggttcctggtcttgtatggcattgctgccccagacagccaaagaattgctttctataggctgttggatgagtttttctaagctcagcacccacaaagctctcaggtcctaagagacactggcacccatatccatgcatcccttgtataaataaagcatccagcaaagctggtaccatgtaaaactgtcttggttgtttccaaggtatagagcatagctcaataggtttttgactttgtcccgcccctctaagtcctgcacacagatactccaatatgacatacagcatgcttgggaactgagtgcccccatgtgggcagagagcaccatgtgccacagtccctgagaagttcttgggaagggtgggcaattgccatgtgtgcctagagaaggttgtttgtaatactgccaagtgccatgtggtgtgatattggctccatgtgccttgtttgtaataacatttccatgtgtcttgggaagaaccatatataagcagagctggtttagtgaaccctcagataggcctagaccatggccagcagtgagaatgtcataacagagttcatgagattcaaggtgaggatggagggaactgtcaatggtcatgagtttgagattgaaggggaaggggagggcagaccctatgagggccacaacacagtcaaattgaaggtgaccaaagggggaccccttccctttgcctgggacatcctgagcccacagtttcagtatggttccaaagtttatgtaaagcaccctgctgacatccctgactacaagaaactgtccttcccagaaggattcaagtgggaaagggtcatgaactttgaggatggaggggttgcaacagtgacccaggacagttctctccaagatggctgtttcatctacaaggtaaaattcattggtgtgaactttccctctgatggcccagtgatgcaaaaaaagaccatgggctgggaagcctcaacagaaaggctgtaccctagagatggagttctcaagggtgagacccacaaagctctaaagctcaaagatgggggccactatctggtggagttcaagagcatctacatggcaaaaaagccagtgcagttgcctggctattactatgtggatgccaagcttgacataacctcacacaatgaagactacactattgtggaacagtatgagaggactgagggaagacatcatctgtttctgtgaattcgcactgcatggacttacctgcctggtggtatcagtcacaggctctgataaggattcagctgttgtataaataaagcatgcagcctagcaggaaccatgttaatctctcttggttgtttccttggaatactcctaagcacattaggtttttagatctgtagaaaagatcaaaggatcttcttgagatcctttttttctgcgcgtaatctgctgcttgcaaacaaaaaaaccaccgctaccagcggtggtttgtttgccggatcaagagctaccaactctttttccgaaggtaactggcttcagcagagcgcagataccaaatactgtccttctagtgtagccgtagttaggccaccacttcaagaactctgtagcaccgcctacatacctcgctctgctaatcctgttaccagtggctgctgccagtggcgataagtcgtgtcttaccgggttggactcaagacgatagttaccggataaggcgcagcggtcgggctgaacggggggttcgtgcacacagcccagcttggagcgaacgacctacaccgaactgagatacctacagcgtgagctatgagaaagcgccacgcttcccgaagggagaaaggcggacaggtatccggtaagcggcagggtcggaacaggagagcgcacgagggagcttccagggggaaacgcctggtatctttatagtcctgtcgggtttcgccacctctgacttgagcgtcgatttttgtgatgctcgtcaggggggcggagcctatggaaaaacgccagcaacgcggcctttttacgg

SEQ ID NO: 625 - DNA, 7343 bp, Artificial Sequence
  pCzGFP-I-T(D402R)-BB3
  CDS (1917)...(4040): Large T Antigen (D402R)
ttcctattaatagtaatcaattacggggtcattagttcatagcccatatatggagttccgcgttacataacttacggtaaatggcccgcctggctgaccgcccaacgacccccgcccattgacgtcaataatgacgtatgttcccatagtaacgccaatagggactttccattgacgtcaatgggtggagtatttacggtaaactgcccacttggcagtacatcaagtgtatcatatgccaagtacgccccctattgacgtcaatgacggtaaatggcccgcctggcattatgcccagtacatgaccttatgggactttcctacttggcagtacatctacgtattagtcatcgctattaccatggtgatgcggttttggcagtacatcaatgggcgtggatagcggtttgactcacggggatttccaagtctccaccccattgacgtcaatgggagtttgttttggcaccaaaatcaacgggactttccaaaatgtcgtaacaactccgccccattgacgcaaatgggcggtaggcgtgtacggtgggaggtctatataagcagagctggtttagtgaaccgtcagatccgctagctagaccatggtgagcaagggagaggaactctttacaggtgtggtcccaattctggtggagctggatggagatgtgaatgggcacaaattttctgtcagtggagagggagagggggatgctacctatggcaaactgactctgaagttcatctgcactactggcaagctgcctgtgccatggccaactctggtgacaaccctcacctatggagtccagtgcttttccagatatcctgaccacatgaaacagcatgactttttcaaatctgcaatgcctgagggctatgtgcaagagagaactatctttttcaaggatgatgggaactataagactagggctgaggtgaaatttgaaggagacaccctggtcaataggattgagctcaaggggattgacttcaaggaggatggcaacattctgggccataagctggagtataattacaattcccacaatgtctacattatggctgacaagcagaagaatggcattaaggtcaacttcaagattagacacaacatagaggatggatctgtgcagctggctgaccattaccagcagaatacacctattggggatgggccagtgctgctccctgacaatcactatctgagcacccaatctgctttgtctaaagatcctaatgaaaagagagatcacatggtgctgctggagtttgtaactgctgcaggaattaccttgggtatggatgaactctataagtaaggatccgcccctctccctcccccccccctaacgttactggccgaagccgcttggaataaggccggtgtgcgtttgtctatatgttattttccaccatattgccgtcttttggcaatgtgagggcccggaaacctggccctgtcttcttgacgagcattcctaggggtctttcccctctcgccaaaggaatgcaaggtctgttgaatgtcgtgaaggaagcagttcctctggaagcttcttgaagacaaacaacgtctgtagcgaccctttgcaggcagcggaaccccccacctggcgacaggtgcctctgcggccaaaagccacgtgtataagatacacctgcaaaggcggcacaaccccagtgccacgttgtgagttggatagttgtggaaagagtcaaatggctctcctcaagcgtattcaacaaggggctgaaggatgcccagaaggtaccccattgtatgggatctgatctggggcctcggtgcacatgctttacatgtgtttagtcgaggttaaaaaaacgtctaggccccccgaaccacggggacgtggttttcctttgaaaaacacgatgataatatggccacaaccatggacaaagtgctgaatagggaggaaagtctgcaactgatggatctgttgggacttgagaggtctgcatggggtaatatcccacttatgaggaaagcatacctgaagaagtgtaaagagttccatcctgacaaaggtggagatgaagagaagatgaaaaagatgaacacactgtataagaaaatggaagatggtgtaaagtatgctcaccagccagattttggaggtttttgggatgccacagagatacctacttatggtacagatgagtgggaacagtggtggaatgcatttaatgaagagaatttgttttgctctgaggaaatgcctagttctgatgatgaggccacagctgactcccagcacagtactccacccaagaaaaagagaaaagtggaagacccaaaggatttcccctctgaactcttgtccttcttgtctcatgcagtgttctcaaataggaccctggcttgctttgctatctacactactaaggagaaggcagctctcttgtacaagaaaatcatggaaaagtattctgtcacctttatttccaggcacaactcctataatcataatattctctttttcttgacaccccataggcatagggtgagtgcaattaacaactatgctcagaagttgtgtactttctccttcctgatctgtaagggtgtgaataaggagtatctcatgtattcagccctgaccagagacccctttagtgtgattgaagaatccctgcctggtgggctcaaggagcatgatttcaacccagaagaggctgaagaaacaaaacaggtgagctggaagcttgtgactgaatatgcaatggagacaaagtgtgatgatgtcctgctcctcctgggaatgtacctggaatttcagtatagctttgaaatgtgtctgaaatgtatcaaaaaggaacagccttctcattataagtatcatgaaaagcactatgccaatgcagctatatttgcagattctaaaaaccagaaaaccatttgtcagcaagctgttgacacagttctggccaagaaaagagtagactctctccagcttaccagggagcagatgttgacaaataggttcaatgaccttctggacagaatggacataatgtttggctcaactggatctgcagatatagaggagtggatggctggagtggcctggctgcactgtctcctccctaaaatgagaagtgtagtctatgacttccttaagtgtatggtctataatatccctaaaaagagatactggttgttcaagggacccattgattcagggaaaactacccttgctgctgcacttctggaactctgtggtgggaaagctctcaatgtcaacctgccacttgatagactcaactttgagctgggggtggcaattgatcagtttttggtagtgtttgaagatgtgaaaggtacaggaggagagtccagggatttgcctagtggccaaggcatcaacaatctggacaacctcagagactacctggatgggtctgtaaaggtcaaccttgaaaaaaagcatctcaacaagaggactcaaatatttccacctggaatagtcactatgaatgaatattcagtgcccaagaccctccaggctagatttgtcaagcaaattgatttcagacctaaagattatctgaaacattgtttggagaggagtgagttcctccttgagaaaaggattattcagtcaggaatagcactgcttcttatgctgatatggtatagaccagtggctgagtttgcccaaagcattcagagtagaatagttgagtggaaagaaaggcttgacaaggagttttctctttcagtatatcaaaagatgaagttcaatgtggctatgggtattggagtgcttgattggttgagaaacagtgatgatgatgatgaagattctcaggaaaatgctgataaaaatgaggatgggggagagaagaatatggaagattctggtcatgaaactggcattgatagtcagagccaggggagtttccaggctccacagagctcccaaagtgtccatgaccacaaccagccttaccatatatgcagaggttttacttgtttcaagaaacctcccactccccctccagaacctgaaacatgagcggccgcgactctagatcataatcagccataccacacctccccctgaacctgaaaaatcaatgcaattattgttgaaataaagcacccagcaatgcctgggaccatgtaaaactgtcctggttctttccaaggtatagagcatagcccacaggctgatatttctggccagggttggttggaggacagccttgtctataggaagagaatgaggtttttgcactataagggcatgcaagtcagtcccgcccctaactccacctggttgcccatcccgcccctaactccgcccagttccgcccattctccgccccatggctgactaattttttttatttatgcagaggcggaggccgcctcggcctctgagctattccagaagtagtgaggaggcttttttggaggcccttaattaaattgacatatctacctaatttgtgtataataaccctgataaatgcttcaataatattgaaaaaggaagagtcctgtataaaaagaaccagctgtggaatgtgtgtcagttagtaggcttatgcaaagtagcccgcccaagagacaggctgaggcccgcccaccatgatagaacaagatggacttcatgctggatctcctgcagcatgggtggaaagactttttggttatgattgggctcagcagaccattggatgttctgatgctgctgtgttcaggcttagtgcacagggtaggccagtgctctttgtgaagactgatctctctggagctttgaatgaactgcaggatgaggctgctaggctttcatggctggccaccacaggtgtcccttgtgctgcagtgttggatgtggttactgaggctgggagggattggctcctcctgggagaagtgccaggtcaggatctgttgagttctcacctggctccagctgaaaaagtctccataatggcagatgctatgagaaggctgcacacattggacccagctacatgcccatttgaccatcaggccaaacacaggattgagagggccagaacaagaatggaggctgggttggtggaccaggatgaccttgatgaggagcatcagggcctggctccagctgaattgtttgccaggctcaaggctagtatgcctgatggggaggatctggtggtaactcatggtgatgcctgtttgcctaacatcatggtggaaaatggaaggttctctggattcattgattgtggaagactgggtgtagctgacaggtatcaggacatagctcttgcaacaagggatattgcagaggagttgggtggagaatgggctgacaggttcctggtcttgtatggcattgctgccccagacagccaaagaattgctttctataggctgttggatgagtttttctaagctcagcacccacaaagctctcaggtcctaagagacactggcacccatatccatgcatcccttgtataaataaagcatccagcaaagctggtaccatgtaaaactgtcttggttgtttccaaggtatagagcatagctcaataggtttttgactttgtcccgcccctctaagtcctgcacacagatactccaatatgacatacagcatgcttgggaactgagtgcccccatgtgggcagagagcaccatgtgccacagtccctgagaagttcttgggaagggtgggcaattgccatgtgtgcctagagaaggttgtttgtaatactgccaagtgccatgtggtgtgatattggctccatgtgccttgtttgtaataacatttccatgtgtcttgggaagaaccatatataagcagagctggtttagtgaaccctcagataggcctagaccatggccagcagtgagaatgtcataacagagttcatgagattcaaggtgaggatggagggaactgtcaatggtcatgagtttgagattgaaggggaaggggagggcagaccctatgagggccacaacacagtcaaattgaaggtgaccaaagggggaccccttccctttgcctgggacatcctgagcccacagtttcagtatggttccaaagtttatgtaaagcaccctgctgacatccctgactacaagaaactgtccttcccagaaggattcaagtgggaaagggtcatgaactttgaggatggaggggttgcaacagtgacccaggacagttctctccaagatggctgtttcatctacaaggtaaaattcattggtgtgaactttccctctgatggcccagtgatgcaaaaaaagaccatgggctgggaagcctcaacagaaaggctgtaccctagagatggagttctcaagggtgagacccacaaagctctaaagctcaaagatgggggccactatctggtggagttcaagagcatctacatggcaaaaaagccagtgcagttgcctggctattactatgtggatgccaagcttgacataacctcacacaatgaagactacactattgtggaacagtatgagaggactgagggaagacatcatctgtttctgtgaattcgcactgcatggacttacctgcctggtggtatcagtcacaggctctgataaggattcagctgttgtataaataaagcatgcagcctagcaggaaccatgttaatctctcttggttgtttccttggaatactcctaagcacattaggtttttagatctgtagaaaagatcaaaggatcttcttgagatcctttttttctgcgcgtaatctgctgcttgcaaacaaaaaaaccaccgctaccagcggtggtttgtttgccggatcaagagctaccaactctttttccgaaggtaactggcttcagcagagcgcagataccaaatactgtccttctagtgtagccgtagttaggccaccacttcaagaactctgtagcaccgcctacatacctcgctctgctaatcctgttaccagtggctgctgccagtggcgataagtcgtgtcttaccgggttggactcaagacgatagttaccggataaggcgcagcggtcgggctgaacggggggttcgtgcacacagcccagcttggagcgaacgacctacaccgaactgagatacctacagcgtgagctatgagaaagcgccacgcttcccgaagggagaaaggcggacaggtatccggtaagcggcagggtcggaacaggagagcgcacgagggagcttccagggggaaacgcctggtatctttatagtcctgtcgggtttcgccacctctgacttgagcgtcgatttttgtgatgctcgtcaggggggcggagcctatggaaaaacgccagcaacgcggcctttttacgg

SEQ ID NO: 626 - DNA, 7343 bp, Artificial Sequence
  pCzGFP-I-T(P453S)-BB3
  CDS (1917)...(4040): Large T Antigen (P453S)
ttcctattaatagtaatcaattacggggtcattagttcatagcccatatatggagttccgcgttacataacttacggtaaatggcccgcctggctgaccgcccaacgacccccgcccattgacgtcaataatgacgtatgttcccatagtaacgccaatagggactttccattgacgtcaatgggtggagtatttacggtaaactgcccacttggcagtacatcaagtgtatcatatgccaagtacgccccctattgacgtcaatgacggtaaatggcccgcctggcattatgcccagtacatgaccttatgggactttcctacttggcagtacatctacgtattagtcatcgctattaccatggtgatgcggttttggcagtacatcaatgggcgtggatagcggtttgactcacggggatttccaagtctccaccccattgacgtcaatgggagtttgttttggcaccaaaatcaacgggactttccaaaatgtcgtaacaactccgccccattgacgcaaatgggcggtaggcgtgtacggtgggaggtctatataagcagagctggtttagtgaaccgtcagatccgctagctagaccatggtgagcaagggagaggaactctttacaggtgtggtcccaattctggtggagctggatggagatgtgaatgggcacaaattttctgtcagtggagagggagagggggatgctacctatggcaaactgactctgaagttcatctgcactactggcaagctgcctgtgccatggccaactctggtgacaaccctcacctatggagtccagtgcttttccagatatcctgaccacatgaaacagcatgactttttcaaatctgcaatgcctgagggctatgtgcaagagagaactatctttttcaaggatgatgggaactataagactagggctgaggtgaaatttgaaggagacaccctggtcaataggattgagctcaaggggattgacttcaaggaggatggcaacattctgggccataagctggagtataattacaattcccacaatgtctacattatggctgacaagcagaagaatggcattaaggtcaacttcaagattagacacaacatagaggatggatctgtgcagctggctgaccattaccagcagaatacacctattggggatgggccagtgctgctccctgacaatcactatctgagcacccaatctgctttgtctaaagatcctaatgaaaagagagatcacatggtgctgctggagtttgtaactgctgcaggaattaccttgggtatggatgaactctataagtaaggatccgcccctctccctcccccccccctaacgttactggccgaagccgcttggaataaggccggtgtgcgtttgtctatatgttattttccaccatattgccgtcttttggcaatgtgagggcccggaaacctggccctgtcttcttgacgagcattcctaggggtctttcccctctcgccaaaggaatgcaaggtctgttgaatgtcgtgaaggaagcagttcctctggaagcttcttgaagacaaacaacgtctgtagcgaccctttgcaggcagcggaaccccccacctggcgacaggtgcctctgcggccaaaagccacgtgtataagatacacctgcaaaggcggcacaaccccagtgccacgttgtgagttggatagttgtggaaagagtcaaatggctctcctcaagcgtattcaacaaggggctgaaggatgcccagaaggtaccccattgtatgggatctgatctggggcctcggtgcacatgctttacatgtgtttagtcgaggttaaaaaaacgtctaggccccccgaaccacggggacgtggttttcctttgaaaaacacgatgataatatggccacaaccatggacaaagtgctgaatagggaggaaagtctgcaactgatggatctgttgggacttgagaggtctgcatggggtaatatcccacttatgaggaaagcatacctgaagaagtgtaaagagttccatcctgacaaaggtggagatgaagagaagatgaaaaagatgaacacactgtataagaaaatggaagatggtgtaaagtatgctcaccagccagattttggaggtttttgggatgccacagagatacctacttatggtacagatgagtgggaacagtggtggaatgcatttaatgaagagaatttgttttgctctgaggaaatgcctagttctgatgatgaggccacagctgactcccagcacagtactccacccaagaaaaagagaaaagtggaagacccaaaggatttcccctctgaactcttgtccttcttgtctcatgcagtgttctcaaataggaccctggcttgctttgctatctacactactaaggagaaggcagctctcttgtacaagaaaatcatggaaaagtattctgtcacctttatttccaggcacaactcctataatcataatattctctttttcttgacaccccataggcatagggtgagtgcaattaacaactatgctcagaagttgtgtactttctccttcctgatctgtaagggtgtgaataaggagtatctcatgtattcagccctgaccagagacccctttagtgtgattgaagaatccctgcctggtgggctcaaggagcatgatttcaacccagaagaggctgaagaaacaaaacaggtgagctggaagcttgtgactgaatatgcaatggagacaaagtgtgatgatgtcctgctcctcctgggaatgtacctggaatttcagtatagctttgaaatgtgtctgaaatgtatcaaaaaggaacagccttctcattataagtatcatgaaaagcactatgccaatgcagctatatttgcagattctaaaaaccagaaaaccatttgtcagcaagctgttgacacagttctggccaagaaaagagtagactctctccagcttaccagggagcagatgttgacaaataggttcaatgaccttctggacagaatggacataatgtttggctcaactggatctgcagatatagaggagtggatggctggagtggcctggctgcactgtctcctccctaaaatggacagtgtagtctatgacttccttaagtgtatggtctataatatccctaaaaagagatactggttgttcaagggacccattgattcagggaaaactacccttgctgctgcacttctggaactctgtggtgggaaagctctcaatgtcaacctgtcacttgatagactcaactttgagctgggggtggcaattgatcagtttttggtagtgtttgaagatgtgaaaggtacaggaggagagtccagggatttgcctagtggccaaggcatcaacaatctggacaacctcagagactacctggatgggtctgtaaaggtcaaccttgaaaaaaagcatctcaacaagaggactcaaatatttccacctggaatagtcactatgaatgaatattcagtgcccaagaccctccaggctagatttgtcaagcaaattgatttcagacctaaagattatctgaaacattgtttggagaggagtgagttcctccttgagaaaaggattattcagtcaggaatagcactgcttcttatgctgatatggtatagaccagtggctgagtttgcccaaagcattcagagtagaatagttgagtggaaagaaaggcttgacaaggagttttctctttcagtatatcaaaagatgaagttcaatgtggctatgggtattggagtgcttgattggttgagaaacagtgatgatgatgatgaagattctcaggaaaatgctgataaaaatgaggatgggggagagaagaatatggaagattctggtcatgaaactggcattgatagtcagagccaggggagtttccaggctccacagagctcccaaagtgtccatgaccacaaccagccttaccatatatgcagaggttttacttgtttcaagaaacctcccactccccctccagaacctgaaacatgagcggccgcgactctagatcataatcagccataccacacctccccctgaacctgaaaaatcaatgcaattattgttgaaataaagcacccagcaatgcctgggaccatgtaaaactgtcctggttctttccaaggtatagagcatagcccacaggctgatatttctggccagggttggttggaggacagccttgtctataggaagagaatgaggtttttgcactataagggcatgcaagtcagtcccgcccctaactccacctggttgcccatcccgcccctaactccgcccagttccgcccattctccgccccatggctgactaattttttttatttatgcagaggcggaggccgcctcggcctctgagctattccagaagtagtgaggaggcttttttggaggcccttaattaaattgacatatctacctaatttgtgtataataaccctgataaatgcttcaataatattgaaaaaggaagagtcctgtataaaaagaaccagctgtggaatgtgtgtcagttagtaggcttatgcaaagtagcccgcccaagagacaggctgaggcccgcccaccatgatagaacaagatggacttcatgctggatctcctgcagcatgggtggaaagactttttggttatgattgggctcagcagaccattggatgttctgatgctgctgtgttcaggcttagtgcacagggtaggccagtgctctttgtgaagactgatctctctggagctttgaatgaactgcaggatgaggctgctaggctttcatggctggccaccacaggtgtcccttgtgctgcagtgttggatgtggttactgaggctgggagggattggctcctcctgggagaagtgccaggtcaggatctgttgagttctcacctggctccagctgaaaaagtctccataatggcagatgctatgagaaggctgcacacattggacccagctacatgcccatttgaccatcaggccaaacacaggattgagagggccagaacaagaatggaggctgggttggtggaccaggatgaccttgatgaggagcatcagggcctggctccagctgaattgtttgccaggctcaaggctagtatgcctgatggggaggatctggtggtaactcatggtgatgcctgtttgcctaacatcatggtggaaaatggaaggttctctggattcattgattgtggaagactgggtgtagctgacaggtatcaggacatagctcttgcaacaagggatattgcagaggagttgggtggagaatgggctgacaggttcctggtcttgtatggcattgctgccccagacagccaaagaattgctttctataggctgttggatgagtttttctaagctcagcacccacaaagctctcaggtcctaagagacactggcacccatatccatgcatcccttgtataaataaagcatccagcaaagctggtaccatgtaaaactgtcttggttgtttccaaggtatagagcatagctcaataggtttttgactttgtcccgcccctctaagtcctgcacacagatactccaatatgacatacagcatgcttgggaactgagtgcccccatgtgggcagagagcaccatgtgccacagtccctgagaagttcttgggaagggtgggcaattgccatgtgtgcctagagaaggttgtttgtaatactgccaagtgccatgtggtgtgatattggctccatgtgccttgtttgtaataacatttccatgtgtcttgggaagaaccatatataagcagagctggtttagtgaaccctcagataggcctagaccatggccagcagtgagaatgtcataacagagttcatgagattcaaggtgaggatggagggaactgtcaatggtcatgagtttgagattgaaggggaaggggagggcagaccctatgagggccacaacacagtcaaattgaaggtgaccaaagggggaccccttccctttgcctgggacatcctgagcccacagtttcagtatggttccaaagtttatgtaaagcaccctgctgacatccctgactacaagaaactgtccttcccagaaggattcaagtgggaaagggtcatgaactttgaggatggaggggttgcaacagtgacccaggacagttctctccaagatggctgtttcatctacaaggtaaaattcattggtgtgaactttccctctgatggcccagtgatgcaaaaaaagaccatgggctgggaagcctcaacagaaaggctgtaccctagagatggagttctcaagggtgagacccacaaagctctaaagctcaaagatgggggccactatctggtggagttcaagagcatctacatggcaaaaaagccagtgcagttgcctggctattactatgtggatgccaagcttgacataacctcacacaatgaagactacactattgtggaacagtatgagaggactgagggaagacatcatctgtttctgtgaattcgcactgcatggacttacctgcctggtggtatcagtcacaggctctgataaggattcagctgttgtataaataaagcatgcagcctagcaggaaccatgttaatctctcttggttgtttccttggaatactcctaagcacattaggtttttagatctgtagaaaagatcaaaggatcttcttgagatcctttttttctgcgcgtaatctgctgcttgcaaacaaaaaaaccaccgctaccagcggtggtttgtttgccggatcaagagctaccaactctttttccgaaggtaactggcttcagcagagcgcagataccaaatactgtccttctagtgtagccgtagttaggccaccacttcaagaactctgtagcaccgcctacatacctcgctctgctaatcctgttaccagtggctgctgccagtggcgataagtcgtgtcttaccgggttggactcaagacgatagttaccggataaggcgcagcggtcgggctgaacggggggttcgtgcacacagcccagcttggagcgaacgacctacaccgaactgagatacctacagcgtgagctatgagaaagcgccacgcttcccgaagggagaaaggcggacaggtatccggtaagcggcagggtcggaacaggagagcgcacgagggagcttccagggggaaacgcctggtatctttatagtcctgtcgggtttcgccacctctgacttgagcgtcgatttttgtgatgctcgtcaggggggcggagcctatggaaaaacgccagcaacgcggcctttttacgg

SEQ ID NO: 627 - DNA, 7343 bp, Artificial Sequence
  pCzGFP-I-T(V585R)-BB3
  CDS (1917)...(4040): Large T Antigen (V585R)
ttcctattaatagtaatcaattacggggtcattagttcatagcccatatatggagttccgcgttacataacttacggtaaatggcccgcctggctgaccgcccaacgacccccgcccattgacgtcaataatgacgtatgttcccatagtaacgccaatagggactttccattgacgtcaatgggtggagtatttacggtaaactgcccacttggcagtacatcaagtgtatcatatgccaagtacgccccctattgacgtcaatgacggtaaatggcccgcctggcattatgcccagtacatgaccttatgggactttcctacttggcagtacatctacgtattagtcatcgctattaccatggtgatgcggttttggcagtacatcaatgggcgtggatagcggtttgactcacggggatttccaagtctccaccccattgacgtcaatgggagtttgttttggcaccaaaatcaacgggactttccaaaatgtcgtaacaactccgccccattgacgcaaatgggcggtaggcgtgtacggtgggaggtctatataagcagagctggtttagtgaaccgtcagatccgctagctagaccatggtgagcaagggagaggaactctttacaggtgtggtcccaattctggtggagctggatggagatgtgaatgggcacaaattttctgtcagtggagagggagagggggatgctacctatggcaaactgactctgaagttcatctgcactactggcaagctgcctgtgccatggccaactctggtgacaaccctcacctatggagtccagtgcttttccagatatcctgaccacatgaaacagcatgactttttcaaatctgcaatgcctgagggctatgtgcaagagagaactatctttttcaaggatgatgggaactataagactagggctgaggtgaaatttgaaggagacaccctggtcaataggattgagctcaaggggattgacttcaaggaggatggcaacattctgggccataagctggagtataattacaattcccacaatgtctacattatggctgacaagcagaagaatggcattaaggtcaacttcaagattagacacaacatagaggatggatctgtgcagctggctgaccattaccagcagaatacacctattggggatgggccagtgctgctccctgacaatcactatctgagcacccaatctgctttgtctaaagatcctaatgaaaagagagatcacatggtgctgctggagtttgtaactgctgcaggaattaccttgggtatggatgaactctataagtaaggatccgcccctctccctcccccccccctaacgttactggccgaagccgcttggaataaggccggtgtgcgtttgtctatatgttattttccaccatattgccgtcttttggcaatgtgagggcccggaaacctggccctgtcttcttgacgagcattcctaggggtctttcccctctcgccaaaggaatgcaaggtctgttgaatgtcgtgaaggaagcagttcctctggaagcttcttgaagacaaacaacgtctgtagcgaccctttgcaggcagcggaaccccccacctggcgacaggtgcctctgcggccaaaagccacgtgtataagatacacctgcaaaggcggcacaaccccagtgccacgttgtgagttggatagttgtggaaagagtcaaatggctctcctcaagcgtattcaacaaggggctgaaggatgcccagaaggtaccccattgtatgggatctgatctggggcctcggtgcacatgctttacatgtgtttagtcgaggttaaaaaaacgtctaggccccccgaaccacggggacgtggttttcctttgaaaaacacgatgataatatggccacaaccatggacaaagtgctgaatagggaggaaagtctgcaactgatggatctgttgggacttgagaggtctgcatggggtaatatcccacttatgaggaaagcatacctgaagaagtgtaaagagttccatcctgacaaaggtggagatgaagagaagatgaaaaagatgaacacactgtataagaaaatggaagatggtgtaaagtatgctcaccagccagattttggaggtttttgggatgccacagagatacctacttatggtacagatgagtgggaacagtggtggaatgcatttaatgaagagaatttgttttgctctgaggaaatgcctagttctgatgatgaggccacagctgactcccagcacagtactccacccaagaaaaagagaaaagtggaagacccaaaggatttcccctctgaactcttgtccttcttgtctcatgcagtgttctcaaataggaccctggcttgctttgctatctacactactaaggagaaggcagctctcttgtacaagaaaatcatggaaaagtattctgtcacctttatttccaggcacaactcctataatcataatattctctttttcttgacaccccataggcatagggtgagtgcaattaacaactatgctcagaagttgtgtactttctccttcctgatctgtaagggtgtgaataaggagtatctcatgtattcagccctgaccagagacccctttagtgtgattgaagaatccctgcctggtgggctcaaggagcatgatttcaacccagaagaggctgaagaaacaaaacaggtgagctggaagcttgtgactgaatatgcaatggagacaaagtgtgatgatgtcctgctcctcctgggaatgtacctggaatttcagtatagctttgaaatgtgtctgaaatgtatcaaaaaggaacagccttctcattataagtatcatgaaaagcactatgccaatgcagctatatttgcagattctaaaaaccagaaaaccatttgtcagcaagctgttgacacagttctggccaagaaaagagtagactctctccagcttaccagggagcagatgttgacaaataggttcaatgaccttctggacagaatggacataatgtttggctcaactggatctgcagatatagaggagtggatggctggagtggcctggctgcactgtctcctccctaaaatggacagtgtagtctatgacttccttaagtgtatggtctataatatccctaaaaagagatactggttgttcaagggacccattgattcagggaaaactacccttgctgctgcacttctggaactctgtggtgggaaagctctcaatgtcaacctgccacttgatagactcaactttgagctgggggtggcaattgatcagtttttggtagtgtttgaagatgtgaaaggtacaggaggagagtccagggatttgcctagtggccaaggcatcaacaatctggacaacctcagagactacctggatgggtctgtaaaggtcaaccttgaaaaaaagcatctcaacaagaggactcaaatatttccacctggaatagtcactatgaatgaatattcagtgcccaagaccctccaggctagatttgtcaagcaaattgatttcagacctaaagattatctgaaacattgtttggagaggagtgagttcctccttgagaaaaggattattcagtcaggaatagcactgcttcttatgctgatatggtatagaccaagggctgagtttgcccaaagcattcagagtagaatagttgagtggaaagaaaggcttgacaaggagttttctctttcagtatatcaaaagatgaagttcaatgtggctatgggtattggagtgcttgattggttgagaaacagtgatgatgatgatgaagattctcaggaaaatgctgataaaaatgaggatgggggagagaagaatatggaagattctggtcatgaaactggcattgatagtcagagccaggggagtttccaggctccacagagctcccaaagtgtccatgaccacaaccagccttaccatatatgcagaggttttacttgtttcaagaaacctcccactccccctccagaacctgaaacatgagcggccgcgactctagatcataatcagccataccacacctccccctgaacctgaaaaatcaatgcaattattgttgaaataaagcacccagcaatgcctgggaccatgtaaaactgtcctggttctttccaaggtatagagcatagcccacaggctgatatttctggccagggttggttggaggacagccttgtctataggaagagaatgaggtttttgcactataagggcatgcaagtcagtcccgcccctaactccacctggttgcccatcccgcccctaactccgcccagttccgcccattctccgccccatggctgactaattttttttatttatgcagaggcggaggccgcctcggcctctgagctattccagaagtagtgaggaggcttttttggaggcccttaattaaattgacatatctacctaatttgtgtataataaccctgataaatgcttcaataatattgaaaaaggaagagtcctgtataaaaagaaccagctgtggaatgtgtgtcagttagtaggcttatgcaaagtagcccgcccaagagacaggctgaggcccgcccaccatgatagaacaagatggacttcatgctggatctcctgcagcatgggtggaaagactttttggttatgattgggctcagcagaccattggatgttctgatgctgctgtgttcaggcttagtgcacagggtaggccagtgctctttgtgaagactgatctctctggagctttgaatgaactgcaggatgaggctgctaggctttcatggctggccaccacaggtgtcccttgtgctgcagtgttggatgtggttactgaggctgggagggattggctcctcctgggagaagtgccaggtcaggatctgttgagttctcacctggctccagctgaaaaagtctccataatggcagatgctatgagaaggctgcacacattggacccagctacatgcccatttgaccatcaggccaaacacaggattgagagggccagaacaagaatggaggctgggttggtggaccaggatgaccttgatgaggagcatcagggcctggctccagctgaattgtttgccaggctcaaggctagtatgcctgatggggaggatctggtggtaactcatggtgatgcctgtttgcctaacatcatggtggaaaatggaaggttctctggattcattgattgtggaagactgggtgtagctgacaggtatcaggacatagctcttgcaacaagggatattgcagaggagttgggtggagaatgggctgacaggttcctggtcttgtatggcattgctgccccagacagccaaagaattgctttctataggctgttggatgagtttttctaagctcagcacccacaaagctctcaggtcctaagagacactggcacccatatccatgcatcccttgtataaataaagcatccagcaaagctggtaccatgtaaaactgtcttggttgtttccaaggtatagagcatagctcaataggtttttgactttgtcccgcccctctaagtcctgcacacagatactccaatatgacatacagcatgcttgggaactgagtgcccccatgtgggcagagagcaccatgtgccacagtccctgagaagttcttgggaagggtgggcaattgccatgtgtgcctagagaaggttgtttgtaatactgccaagtgccatgtggtgtgatattggctccatgtgccttgtttgtaataacatttccatgtgtcttgggaagaaccatatataagcagagctggtttagtgaaccctcagataggcctagaccatggccagcagtgagaatgtcataacagagttcatgagattcaaggtgaggatggagggaactgtcaatggtcatgagtttgagattgaaggggaaggggagggcagaccctatgagggccacaacacagtcaaattgaaggtgaccaaagggggaccccttccctttgcctgggacatcctgagcccacagtttcagtatggttccaaagtttatgtaaagcaccctgctgacatccctgactacaagaaactgtccttcccagaaggattcaagtgggaaagggtcatgaactttgaggatggaggggttgcaacagtgacccaggacagttctctccaagatggctgtttcatctacaaggtaaaattcattggtgtgaactttccctctgatggcccagtgatgcaaaaaaagaccatgggctgggaagcctcaacagaaaggctgtaccctagagatggagttctcaagggtgagacccacaaagctctaaagctcaaagatgggggccactatctggtggagttcaagagcatctacatggcaaaaaagccagtgcagttgcctggctattactatgtggatgccaagcttgacataacctcacacaatgaagactacactattgtggaacagtatgagaggactgagggaagacatcatctgtttctgtgaattcgcactgcatggacttacctgcctggtggtatcagtcacaggctctgataaggattcagctgttgtataaataaagcatgcagcctagcaggaaccatgttaatctctcttggttgtttccttggaatactcctaagcacattaggtttttagatctgtagaaaagatcaaaggatcttcttgagatcctttttttctgcgcgtaatctgctgcttgcaaacaaaaaaaccaccgctaccagcggtggtttgtttgccggatcaagagctaccaactctttttccgaaggtaactggcttcagcagagcgcagataccaaatactgtccttctagtgtagccgtagttaggccaccacttcaagaactctgtagcaccgcctacatacctcgctctgctaatcctgttaccagtggctgctgccagtggcgataagtcgtgtcttaccgggttggactcaagacgatagttaccggataaggcgcagcggtcgggctgaacggggggttcgtgcacacagcccagcttggagcgaacgacctacaccgaactgagatacctacagcgtgagctatgagaaagcgccacgcttcccgaagggagaaaggcggacaggtatccggtaagcggcagggtcggaacaggagagcgcacgagggagcttccagggggaaacgcctggtatctttatagtcctgtcgggtttcgccacctctgacttgagcgtcgatttttgtgatgctcgtcaggggggcggagcctatggaaaaacgccagcaacgcggcctttttacgg

SEQ ID NO: 628 - DNA, 7343 bp, Artificial Sequence
  pCzGFP-I-T(D604R)-BB3
  CDS (1917)...(4040): Large T Antigen (D604R)
ttcctattaatagtaatcaattacggggtcattagttcatagcccatatatggagttccgcgttacataacttacggtaaatggcccgcctggctgaccgcccaacgacccccgcccattgacgtcaataatgacgtatgttcccatagtaacgccaatagggactttccattgacgtcaatgggtggagtatttacggtaaactgcccacttggcagtacatcaagtgtatcatatgccaagtacgccccctattgacgtcaatgacggtaaatggcccgcctggcattatgcccagtacatgaccttatgggactttcctacttggcagtacatctacgtattagtcatcgctattaccatggtgatgcggttttggcagtacatcaatgggcgtggatagcggtttgactcacggggatttccaagtctccaccccattgacgtcaatgggagtttgttttggcaccaaaatcaacgggactttccaaaatgtcgtaacaactccgccccattgacgcaaatgggcggtaggcgtgtacggtgggaggtctatataagcagagctggtttagtgaaccgtcagatccgctagctagaccatggtgagcaagggagaggaactctttacaggtgtggtcccaattctggtggagctggatggagatgtgaatgggcacaaattttctgtcagtggagagggagagggggatgctacctatggcaaactgactctgaagttcatctgcactactggcaagctgcctgtgccatggccaactctggtgacaaccctcacctatggagtccagtgcttttccagatatcctgaccacatgaaacagcatgactttttcaaatctgcaatgcctgagggctatgtgcaagagagaactatctttttcaaggatgatgggaactataagactagggctgaggtgaaatttgaaggagacaccctggtcaataggattgagctcaaggggattgacttcaaggaggatggcaacattctgggccataagctggagtataattacaattcccacaatgtctacattatggctgacaagcagaagaatggcattaaggtcaacttcaagattagacacaacatagaggatggatctgtgcagctggctgaccattaccagcagaatacacctattggggatgggccagtgctgctccctgacaatcactatctgagcacccaatctgctttgtctaaagatcctaatgaaaagagagatcacatggtgctgctggagtttgtaactgctgcaggaattaccttgggtatggatgaactctataagtaaggatccgcccctctccctcccccccccctaacgttactggccgaagccgcttggaataaggccggtgtgcgtttgtctatatgttattttccaccatattgccgtcttttggcaatgtgagggcccggaaacctggccctgtcttcttgacgagcattcctaggggtctttcccctctcgccaaaggaatgcaaggtctgttgaatgtcgtgaaggaagcagttcctctggaagcttcttgaagacaaacaacgtctgtagcgaccctttgcaggcagcggaaccccccacctggcgacaggtgcctctgcggccaaaagccacgtgtataagatacacctgcaaaggcggcacaaccccagtgccacgttgtgagttggatagttgtggaaagagtcaaatggctctcctcaagcgtattcaacaaggggctgaaggatgcccagaaggtaccccattgtatgggatctgatctggggcctcggtgcacatgctttacatgtgtttagtcgaggttaaaaaaacgtctaggccccccgaaccacggggacgtggttttcctttgaaaaacacgatgataatatggccacaaccatggacaaagtgctgaatagggaggaaagtctgcaactgatggatctgttgggacttgagaggtctgcatggggtaatatcccacttatgaggaaagcatacctgaagaagtgtaaagagttccatcctgacaaaggtggagatgaagagaagatgaaaaagatgaacacactgtataagaaaatggaagatggtgtaaagtatgctcaccagccagattttggaggtttttgggatgccacagagatacctacttatggtacagatgagtgggaacagtggtggaatgcatttaatgaagagaatttgttttgctctgaggaaatgcctagttctgatgatgaggccacagctgactcccagcacagtactccacccaagaaaaagagaaaagtggaagacccaaaggatttcccctctgaactcttgtccttcttgtctcatgcagtgttctcaaataggaccctggcttgctttgctatctacactactaaggagaaggcagctctcttgtacaagaaaatcatggaaaagtattctgtcacctttatttccaggcacaactcctataatcataatattctctttttcttgacaccccataggcatagggtgagtgcaattaacaactatgctcagaagttgtgtactttctccttcctgatctgtaagggtgtgaataaggagtatctcatgtattcagccctgaccagagacccctttagtgtgattgaagaatccctgcctggtgggctcaaggagcatgatttcaacccagaagaggctgaagaaacaaaacaggtgagctggaagcttgtgactgaatatgcaatggagacaaagtgtgatgatgtcctgctcctcctgggaatgtacctggaatttcagtatagctttgaaatgtgtctgaaatgtatcaaaaaggaacagccttctcattataagtatcatgaaaagcactatgccaatgcagctatatttgcagattctaaaaaccagaaaaccatttgtcagcaagctgttgacacagttctggccaagaaaagagtagactctctccagcttaccagggagcagatgttgacaaataggttcaatgaccttctggacagaatggacataatgtttggctcaactggatctgcagatatagaggagtggatggctggagtggcctggctgcactgtctcctccctaaaatggacagtgtagtctatgacttccttaagtgtatggtctataatatccctaaaaagagatactggttgttcaagggacccattgattcagggaaaactacccttgctgctgcacttctggaactctgtggtgggaaagctctcaatgtcaacctgccacttgatagactcaactttgagctgggggtggcaattgatcagtttttggtagtgtttgaagatgtgaaaggtacaggaggagagtccagggatttgcctagtggccaaggcatcaacaatctggacaacctcagagactacctggatgggtctgtaaaggtcaaccttgaaaaaaagcatctcaacaagaggactcaaatatttccacctggaatagtcactatgaatgaatattcagtgcccaagaccctccaggctagatttgtcaagcaaattgatttcagacctaaagattatctgaaacattgtttggagaggagtgagttcctccttgagaaaaggattattcagtcaggaatagcactgcttcttatgctgatatggtatagaccagtggctgagtttgcccaaagcattcagagtagaatagttgagtggaaagaaaggcttagaaaggagttttctctttcagtatatcaaaagatgaagttcaatgtggctatgggtattggagtgcttgattggttgagaaacagtgatgatgatgatgaagattctcaggaaaatgctgataaaaatgaggatgggggagagaagaatatggaagattctggtcatgaaactggcattgatagtcagagccaggggagtttccaggctccacagagctcccaaagtgtccatgaccacaaccagccttaccatatatgcagaggttttacttgtttcaagaaacctcccactccccctccagaacctgaaacatgagcggccgcgactctagatcataatcagccataccacacctccccctgaacctgaaaaatcaatgcaattattgttgaaataaagcacccagcaatgcctgggaccatgtaaaactgtcctggttctttccaaggtatagagcatagcccacaggctgatatttctggccagggttggttggaggacagccttgtctataggaagagaatgaggtttttgcactataagggcatgcaagtcagtcccgcccctaactccacctggttgcccatcccgcccctaactccgcccagttccgcccattctccgccccatggctgactaattttttttatttatgcagaggcggaggccgcctcggcctctgagctattccagaagtagtgaggaggcttttttggaggcccttaattaaattgacatatctacctaatttgtgtataataaccctgataaatgcttcaataatattgaaaaaggaagagtcctgtataaaaagaaccagctgtggaatgtgtgtcagttagtaggcttatgcaaagtagcccgcccaagagacaggctgaggcccgcccaccatgatagaacaagatggacttcatgctggatctcctgcagcatgggtggaaagactttttggttatgattgggctcagcagaccattggatgttctgatgctgctgtgttcaggcttagtgcacagggtaggccagtgctctttgtgaagactgatctctctggagctttgaatgaactgcaggatgaggctgctaggctttcatggctggccaccacaggtgtcccttgtgctgcagtgttggatgtggttactgaggctgggagggattggctcctcctgggagaagtgccaggtcaggatctgttgagttctcacctggctccagctgaaaaagtctccataatggcagatgctatgagaaggctgcacacattggacccagctacatgcccatttgaccatcaggccaaacacaggattgagagggccagaacaagaatggaggctgggttggtggaccaggatgaccttgatgaggagcatcagggcctggctccagctgaattgtttgccaggctcaaggctagtatgcctgatggggaggatctggtggtaactcatggtgatgcctgtttgcctaacatcatggtggaaaatggaaggttctctggattcattgattgtggaagactgggtgtagctgacaggtatcaggacatagctcttgcaacaagggatattgcagaggagttgggtggagaatgggctgacaggttcctggtcttgtatggcattgctgccccagacagccaaagaattgctttctataggctgttggatgagtttttctaagctcagcacccacaaagctctcaggtcctaagagacactggcacccatatccatgcatcccttgtataaataaagcatccagcaaagctggtaccatgtaaaactgtcttggttgtttccaaggtatagagcatagctcaataggtttttgactttgtcccgcccctctaagtcctgcacacagatactccaatatgacatacagcatgcttgggaactgagtgcccccatgtgggcagagagcaccatgtgccacagtccctgagaagttcttgggaagggtgggcaattgccatgtgtgcctagagaaggttgtttgtaatactgccaagtgccatgtggtgtgatattggctccatgtgccttgtttgtaataacatttccatgtgtcttgggaagaaccatatataagcagagctggtttagtgaaccctcagataggcctagaccatggccagcagtgagaatgtcataacagagttcatgagattcaaggtgaggatggagggaactgtcaatggtcatgagtttgagattgaaggggaaggggagggcagaccctatgagggccacaacacagtcaaattgaaggtgaccaaagggggaccccttccctttgcctgggacatcctgagcccacagtttcagtatggttccaaagtttatgtaaagcaccctgctgacatccctgactacaagaaactgtccttcccagaaggattcaagtgggaaagggtcatgaactttgaggatggaggggttgcaacagtgacccaggacagttctctccaagatggctgtttcatctacaaggtaaaattcattggtgtgaactttccctctgatggcccagtgatgcaaaaaaagaccatgggctgggaagcctcaacagaaaggctgtaccctagagatggagttctcaagggtgagacccacaaagctctaaagctcaaagatgggggccactatctggtggagttcaagagcatctacatggcaaaaaagccagtgcagttgcctggctattactatgtggatgccaagcttgacataacctcacacaatgaagactacactattgtggaacagtatgagaggactgagggaagacatcatctgtttctgtgaattcgcactgcatggacttacctgcctggtggtatcagtcacaggctctgataaggattcagctgttgtataaataaagcatgcagcctagcaggaaccatgttaatctctcttggttgtttccttggaatactcctaagcacattaggtttttagatctgtagaaaagatcaaaggatcttcttgagatcctttttttctgcgcgtaatctgctgcttgcaaacaaaaaaaccaccgctaccagcggtggtttgtttgccggatcaagagctaccaactctttttccgaaggtaactggcttcagcagagcgcagataccaaatactgtccttctagtgtagccgtagttaggccaccacttcaagaactctgtagcaccgcctacatacctcgctctgctaatcctgttaccagtggctgctgccagtggcgataagtcgtgtcttaccgggttggactcaagacgatagttaccggataaggcgcagcggtcgggctgaacggggggttcgtgcacacagcccagcttggagcgaacgacctacaccgaactgagatacctacagcgtgagctatgagaaagcgccacgcttcccgaagggagaaaggcggacaggtatccggtaagcggcagggtcggaacaggagagcgcacgagggagcttccagggggaaacgcctggtatctttatagtcctgtcgggtttcgccacctctgacttgagcgtcgatttttgtgatgctcgtcaggggggcggagcctatggaaaaacgccagcaacgcggcctttttacgg

SEQ ID NO: 629 - DNA, 7343 bp, Artificial Sequence
  pCzGFP-I-T(L103P/C105A)-BB3
  CDS (1917)...(4040): Large T Antigen (L103P/C105A)
ttcctattaatagtaatcaattacggggtcattagttcatagcccatatatggagttccgcgttacataacttacggtaaatggcccgcctggctgaccgcccaacgacccccgcccattgacgtcaataatgacgtatgttcccatagtaacgccaatagggactttccattgacgtcaatgggtggagtatttacggtaaactgcccacttggcagtacatcaagtgtatcatatgccaagtacgccccctattgacgtcaatgacggtaaatggcccgcctggcattatgcccagtacatgaccttatgggactttcctacttggcagtacatctacgtattagtcatcgctattaccatggtgatgcggttttggcagtacatcaatgggcgtggatagcggtttgactcacggggatttccaagtctccaccccattgacgtcaatgggagtttgttttggcaccaaaatcaacgggactttccaaaatgtcgtaacaactccgccccattgacgcaaatgggcggtaggcgtgtacggtgggaggtctatataagcagagctggtttagtgaaccgtcagatccgctagctagaccatggtgagcaagggagaggaactctttacaggtgtggtcccaattctggtggagctggatggagatgtgaatgggcacaaattttctgtcagtggagagggagagggggatgctacctatggcaaactgactctgaagttcatctgcactactggcaagctgcctgtgccatggccaactctggtgacaaccctcacctatggagtccagtgcttttccagatatcctgaccacatgaaacagcatgactttttcaaatctgcaatgcctgagggctatgtgcaagagagaactatctttttcaaggatgatgggaactataagactagggctgaggtgaaatttgaaggagacaccctggtcaataggattgagctcaaggggattgacttcaaggaggatggcaacattctgggccataagctggagtataattacaattcccacaatgtctacattatggctgacaagcagaagaatggcattaaggtcaacttcaagattagacacaacatagaggatggatctgtgcagctggctgaccattaccagcagaatacacctattggggatgggccagtgctgctccctgacaatcactatctgagcacccaatctgctttgtctaaagatcctaatgaaaagagagatcacatggtgctgctggagtttgtaactgctgcaggaattaccttgggtatggatgaactctataagtaaggatccgcccctctccctcccccccccctaacgttactggccgaagccgcttggaataaggccggtgtgcgtttgtctatatgttattttccaccatattgccgtcttttggcaatgtgagggcccggaaacctggccctgtcttcttgacgagcattcctaggggtctttcccctctcgccaaaggaatgcaaggtctgttgaatgtcgtgaaggaagcagttcctctggaagcttcttgaagacaaacaacgtctgtagcgaccctttgcaggcagcggaaccccccacctggcgacaggtgcctctgcggccaaaagccacgtgtataagatacacctgcaaaggcggcacaaccccagtgccacgttgtgagttggatagttgtggaaagagtcaaatggctctcctcaagcgtattcaacaaggggctgaaggatgcccagaaggtaccccattgtatgggatctgatctggggcctcggtgcacatgctttacatgtgtttagtcgaggttaaaaaaacgtctaggccccccgaaccacggggacgtggttttcctttgaaaaacacgatgataatatggccacaaccatggacaaagtgctgaatagggaggaaagtctgcaactgatggatctgttgggacttgagaggtctgcatggggtaatatcccacttatgaggaaagcatacctgaagaagtgtaaagagttccatcctgacaaaggtggagatgaagagaagatgaaaaagatgaacacactgtataagaaaatggaagatggtgtaaagtatgctcaccagccagattttggaggtttttgggatgccacagagatacctacttatggtacagatgagtgggaacagtggtggaatgcatttaatgaagagaatccctttgcctctgaggaaatgcctagttctgatgatgaggccacagctgactcccagcacagtactccacccaagaaaaagagaaaagtggaagacccaaaggatttcccctctgaactcttgtccttcttgtctcatgcagtgttctcaaataggaccctggcttgctttgctatctacactactaaggagaaggcagctctcttgtacaagaaaatcatggaaaagtattctgtcacctttatttccaggcacaactcctataatcataatattctctttttcttgacaccccataggcatagggtgagtgcaattaacaactatgctcagaagttgtgtactttctccttcctgatctgtaagggtgtgaataaggagtatctcatgtattcagccctgaccagagacccctttagtgtgattgaagaatccctgcctggtgggctcaaggagcatgatttcaacccagaagaggctgaagaaacaaaacaggtgagctggaagcttgtgactgaatatgcaatggagacaaagtgtgatgatgtcctgctcctcctgggaatgtacctggaatttcagtatagctttgaaatgtgtctgaaatgtatcaaaaaggaacagccttctcattataagtatcatgaaaagcactatgccaatgcagctatatttgcagattctaaaaaccagaaaaccatttgtcagcaagctgttgacacagttctggccaagaaaagagtagactctctccagcttaccagggagcagatgttgacaaataggttcaatgaccttctggacagaatggacataatgtttggctcaactggatctgcagatatagaggagtggatggctggagtggcctggctgcactgtctcctccctaaaatggacagtgtagtctatgacttccttaagtgtatggtctataatatccctaaaaagagatactggttgttcaagggacccattgattcagggaaaactacccttgctgctgcacttctggaactctgtggtgggaaagctctcaatgtcaacctgccacttgatagactcaactttgagctgggggtggcaattgatcagtttttggtagtgtttgaagatgtgaaaggtacaggaggagagtccagggatttgcctagtggccaaggcatcaacaatctggacaacctcagagactacctggatgggtctgtaaaggtcaaccttgaaaaaaagcatctcaacaagaggactcaaatatttccacctggaatagtcactatgaatgaatattcagtgcccaagaccctccaggctagatttgtcaagcaaattgatttcagacctaaagattatctgaaacattgtttggagaggagtgagttcctccttgagaaaaggattattcagtcaggaatagcactgcttcttatgctgatatggtatagaccagtggctgagtttgcccaaagcattcagagtagaatagttgagtggaaagaaaggcttgacaaggagttttctctttcagtatatcaaaagatgaagttcaatgtggctatgggtattggagtgcttgattggttgagaaacagtgatgatgatgatgaagattctcaggaaaatgctgataaaaatgaggatgggggagagaagaatatggaagattctggtcatgaaactggcattgatagtcagagccaggggagtttccaggctccacagagctcccaaagtgtccatgaccacaaccagccttaccatatatgcagaggttttacttgtttcaagaaacctcccactccccctccagaacctgaaacatgagcggccgcgactctagatcataatcagccataccacacctccccctgaacctgaaaaatcaatgcaattattgttgaaataaagcacccagcaatgcctgggaccatgtaaaactgtcctggttctttccaaggtatagagcatagcccacaggctgatatttctggccagggttggttggaggacagccttgtctataggaagagaatgaggtttttgcactataagggcatgcaagtcagtcccgcccctaactccacctggttgcccatcccgcccctaactccgcccagttccgcccattctccgccccatggctgactaattttttttatttatgcagaggcggaggccgcctcggcctctgagctattccagaagtagtgaggaggcttttttggaggcccttaattaaattgacatatctacctaatttgtgtataataaccctgataaatgcttcaataatattgaaaaaggaagagtcctgtataaaaagaaccagctgtggaatgtgtgtcagttagtaggcttatgcaaagtagcccgcccaagagacaggctgaggcccgcccaccatgatagaacaagatggacttcatgctggatctcctgcagcatgggtggaaagactttttggttatgattgggctcagcagaccattggatgttctgatgctgctgtgttcaggcttagtgcacagggtaggccagtgctctttgtgaagactgatctctctggagctttgaatgaactgcaggatgaggctgctaggctttcatggctggccaccacaggtgtcccttgtgctgcagtgttggatgtggttactgaggctgggagggattggctcctcctgggagaagtgccaggtcaggatctgttgagttctcacctggctccagctgaaaaagtctccataatggcagatgctatgagaaggctgcacacattggacccagctacatgcccatttgaccatcaggccaaacacaggattgagagggccagaacaagaatggaggctgggttggtggaccaggatgaccttgatgaggagcatcagggcctggctccagctgaattgtttgccaggctcaaggctagtatgcctgatggggaggatctggtggtaactcatggtgatgcctgtttgcctaacatcatggtggaaaatggaaggttctctggattcattgattgtggaagactgggtgtagctgacaggtatcaggacatagctcttgcaacaagggatattgcagaggagttgggtggagaatgggctgacaggttcctggtcttgtatggcattgctgccccagacagccaaagaattgctttctataggctgttggatgagtttttctaagctcagcacccacaaagctctcaggtcctaagagacactggcacccatatccatgcatcccttgtataaataaagcatccagcaaagctggtaccatgtaaaactgtcttggttgtttccaaggtatagagcatagctcaataggtttttgactttgtcccgcccctctaagtcctgcacacagatactccaatatgacatacagcatgcttgggaactgagtgcccccatgtgggcagagagcaccatgtgccacagtccctgagaagttcttgggaagggtgggcaattgccatgtgtgcctagagaaggttgtttgtaatactgccaagtgccatgtggtgtgatattggctccatgtgccttgtttgtaataacatttccatgtgtcttgggaagaaccatatataagcagagctggtttagtgaaccctcagataggcctagaccatggccagcagtgagaatgtcataacagagttcatgagattcaaggtgaggatggagggaactgtcaatggtcatgagtttgagattgaaggggaaggggagggcagaccctatgagggccacaacacagtcaaattgaaggtgaccaaagggggaccccttccctttgcctgggacatcctgagcccacagtttcagtatggttccaaagtttatgtaaagcaccctgctgacatccctgactacaagaaactgtccttcccagaaggattcaagtgggaaagggtcatgaactttgaggatggaggggttgcaacagtgacccaggacagttctctccaagatggctgtttcatctacaaggtaaaattcattggtgtgaactttccctctgatggcccagtgatgcaaaaaaagaccatgggctgggaagcctcaacagaaaggctgtaccctagagatggagttctcaagggtgagacccacaaagctctaaagctcaaagatgggggccactatctggtggagttcaagagcatctacatggcaaaaaagccagtgcagttgcctggctattactatgtggatgccaagcttgacataacctcacacaatgaagactacactattgtggaacagtatgagaggactgagggaagacatcatctgtttctgtgaattcgcactgcatggacttacctgcctggtggtatcagtcacaggctctgataaggattcagctgttgtataaataaagcatgcagcctagcaggaaccatgttaatctctcttggttgtttccttggaatactcctaagcacattaggtttttagatctgtagaaaagatcaaaggatcttcttgagatcctttttttctgcgcgtaatctgctgcttgcaaacaaaaaaaccaccgctaccagcggtggtttgtttgccggatcaagagctaccaactctttttccgaaggtaactggcttcagcagagcgcagataccaaatactgtccttctagtgtagccgtagttaggccaccacttcaagaactctgtagcaccgcctacatacctcgctctgctaatcctgttaccagtggctgctgccagtggcgataagtcgtgtcttaccgggttggactcaagacgatagttaccggataaggcgcagcggtcgggctgaacggggggttcgtgcacacagcccagcttggagcgaacgacctacaccgaactgagatacctacagcgtgagctatgagaaagcgccacgcttcccgaagggagaaaggcggacaggtatccggtaagcggcagggtcggaacaggagagcgcacgagggagcttccagggggaaacgcctggtatctttatagtcctgtcgggtttcgccacctctgacttgagcgtcgatttttgtgatgctcgtcaggggggcggagcctatggaaaaacgccagcaacgcggcctttttacgg

SEQ ID NO: 630 - DNA, 7343 bp, Artificial Sequence
  pCzGFP-I-T(L103P/E107L)-BB3
  CDS (1917)...(4040): Large T Antigen (L103P/E107L)
ttcctattaatagtaatcaattacggggtcattagttcatagcccatatatggagttccgcgttacataacttacggtaaatggcccgcctggctgaccgcccaacgacccccgcccattgacgtcaataatgacgtatgttcccatagtaacgccaatagggactttccattgacgtcaatgggtggagtatttacggtaaactgcccacttggcagtacatcaagtgtatcatatgccaagtacgccccctattgacgtcaatgacggtaaatggcccgcctggcattatgcccagtacatgaccttatgggactttcctacttggcagtacatctacgtattagtcatcgctattaccatggtgatgcggttttggcagtacatcaatgggcgtggatagcggtttgactcacggggatttccaagtctccaccccattgacgtcaatgggagtttgttttggcaccaaaatcaacgggactttccaaaatgtcgtaacaactccgccccattgacgcaaatgggcggtaggcgtgtacggtgggaggtctatataagcagagctggtttagtgaaccgtcagatccgctagctagaccatggtgagcaagggagaggaactctttacaggtgtggtcccaattctggtggagctggatggagatgtgaatgggcacaaattttctgtcagtggagagggagagggggatgctacctatggcaaactgactctgaagttcatctgcactactggcaagctgcctgtgccatggccaactctggtgacaaccctcacctatggagtccagtgcttttccagatatcctgaccacatgaaacagcatgactttttcaaatctgcaatgcctgagggctatgtgcaagagagaactatctttttcaaggatgatgggaactataagactagggctgaggtgaaatttgaaggagacaccctggtcaataggattgagctcaaggggattgacttcaaggaggatggcaacattctgggccataagctggagtataattacaattcccacaatgtctacattatggctgacaagcagaagaatggcattaaggtcaacttcaagattagacacaacatagaggatggatctgtgcagctggctgaccattaccagcagaatacacctattggggatgggccagtgctgctccctgacaatcactatctgagcacccaatctgctttgtctaaagatcctaatgaaaagagagatcacatggtgctgctggagtttgtaactgctgcaggaattaccttgggtatggatgaactctataagtaaggatccgcccctctccctcccccccccctaacgttactggccgaagccgcttggaataaggccggtgtgcgtttgtctatatgttattttccaccatattgccgtcttttggcaatgtgagggcccggaaacctggccctgtcttcttgacgagcattcctaggggtctttcccctctcgccaaaggaatgcaaggtctgttgaatgtcgtgaaggaagcagttcctctggaagcttcttgaagacaaacaacgtctgtagcgaccctttgcaggcagcggaaccccccacctggcgacaggtgcctctgcggccaaaagccacgtgtataagatacacctgcaaaggcggcacaaccccagtgccacgttgtgagttggatagttgtggaaagagtcaaatggctctcctcaagcgtattcaacaaggggctgaaggatgcccagaaggtaccccattgtatgggatctgatctggggcctcggtgcacatgctttacatgtgtttagtcgaggttaaaaaaacgtctaggccccccgaaccacggggacgtggttttcctttgaaaaacacgatgataatatggccacaaccatggacaaagtgctgaatagggaggaaagtctgcaactgatggatctgttgggacttgagaggtctgcatggggtaatatcccacttatgaggaaagcatacctgaagaagtgtaaagagttccatcctgacaaaggtggagatgaagagaagatgaaaaagatgaacacactgtataagaaaatggaagatggtgtaaagtatgctcaccagccagattttggaggtttttgggatgccacagagatacctacttatggtacagatgagtgggaacagtggtggaatgcatttaatgaagagaatcccttttgctctaaggaaatgcctagttctgatgatgaggccacagctgactcccagcacagtactccacccaagaaaaagagaaaagtggaagacccaaaggatttcccctctgaactcttgtccttcttgtctcatgcagtgttctcaaataggaccctggcttgctttgctatctacactactaaggagaaggcagctctcttgtacaagaaaatcatggaaaagtattctgtcacctttatttccaggcacaactcctataatcataatattctctttttcttgacaccccataggcatagggtgagtgcaattaacaactatgctcagaagttgtgtactttctccttcctgatctgtaagggtgtgaataaggagtatctcatgtattcagccctgaccagagacccctttagtgtgattgaagaatccctgcctggtgggctcaaggagcatgatttcaacccagaagaggctgaagaaacaaaacaggtgagctggaagcttgtgactgaatatgcaatggagacaaagtgtgatgatgtcctgctcctcctgggaatgtacctggaatttcagtatagctttgaaatgtgtctgaaatgtatcaaaaaggaacagccttctcattataagtatcatgaaaagcactatgccaatgcagctatatttgcagattctaaaaaccagaaaaccatttgtcagcaagctgttgacacagttctggccaagaaaagagtagactctctccagcttaccagggagcagatgttgacaaataggttcaatgaccttctggacagaatggacataatgtttggctcaactggatctgcagatatagaggagtggatggctggagtggcctggctgcactgtctcctccctaaaatggacagtgtagtctatgacttccttaagtgtatggtctataatatccctaaaaagagatactggttgttcaagggacccattgattcagggaaaactacccttgctgctgcacttctggaactctgtggtgggaaagctctcaatgtcaacctgccacttgatagactcaactttgagctgggggtggcaattgatcagtttttggtagtgtttgaagatgtgaaaggtacaggaggagagtccagggatttgcctagtggccaaggcatcaacaatctggacaacctcagagactacctggatgggtctgtaaaggtcaaccttgaaaaaaagcatctcaacaagaggactcaaatatttccacctggaatagtcactatgaatgaatattcagtgcccaagaccctccaggctagatttgtcaagcaaattgatttcagacctaaagattatctgaaacattgtttggagaggagtgagttcctccttgagaaaaggattattcagtcaggaatagcactgcttcttatgctgatatggtatagaccagtggctgagtttgcccaaagcattcagagtagaatagttgagtggaaagaaaggcttgacaaggagttttctctttcagtatatcaaaagatgaagttcaatgtggctatgggtattggagtgcttgattggttgagaaacagtgatgatgatgatgaagattctcaggaaaatgctgataaaaatgaggatgggggagagaagaatatggaagattctggtcatgaaactggcattgatagtcagagccaggggagtttccaggctccacagagctcccaaagtgtccatgaccacaaccagccttaccatatatgcagaggttttacttgtttcaagaaacctcccactccccctccagaacctgaaacatgagcggccgcgactctagatcataatcagccataccacacctccccctgaacctgaaaaatcaatgcaattattgttgaaataaagcacccagcaatgcctgggaccatgtaaaactgtcctggttctttccaaggtatagagcatagcccacaggctgatatttctggccagggttggttggaggacagccttgtctataggaagagaatgaggtttttgcactataagggcatgcaagtcagtcccgcccctaactccacctggttgcccatcccgcccctaactccgcccagttccgcccattctccgccccatggctgactaattttttttatttatgcagaggcggaggccgcctcggcctctgagctattccagaagtagtgaggaggcttttttggaggcccttaattaaattgacatatctacctaatttgtgtataataaccctgataaatgcttcaataatattgaaaaaggaagagtcctgtataaaaagaaccagctgtggaatgtgtgtcagttagtaggcttatgcaaagtagcccgcccaagagacaggctgaggcccgcccaccatgatagaacaagatggacttcatgctggatctcctgcagcatgggtggaaagactttttggttatgattgggctcagcagaccattggatgttctgatgctgctgtgttcaggcttagtgcacagggtaggccagtgctctttgtgaagactgatctctctggagctttgaatgaactgcaggatgaggctgctaggctttcatggctggccaccacaggtgtcccttgtgctgcagtgttggatgtggttactgaggctgggagggattggctcctcctgggagaagtgccaggtcaggatctgttgagttctcacctggctccagctgaaaaagtctccataatggcagatgctatgagaaggctgcacacattggacccagctacatgcccatttgaccatcaggccaaacacaggattgagagggccagaacaagaatggaggctgggttggtggaccaggatgaccttgatgaggagcatcagggcctggctccagctgaattgtttgccaggctcaaggctagtatgcctgatggggaggatctggtggtaactcatggtgatgcctgtttgcctaacatcatggtggaaaatggaaggttctctggattcattgattgtggaagactgggtgtagctgacaggtatcaggacatagctcttgcaacaagggatattgcagaggagttgggtggagaatgggctgacaggttcctggtcttgtatggcattgctgccccagacagccaaagaattgctttctataggctgttggatgagtttttctaagctcagcacccacaaagctctcaggtcctaagagacactggcacccatatccatgcatcccttgtataaataaagcatccagcaaagctggtaccatgtaaaactgtcttggttgtttccaaggtatagagcatagctcaataggtttttgactttgtcccgcccctctaagtcctgcacacagatactccaatatgacatacagcatgcttgggaactgagtgcccccatgtgggcagagagcaccatgtgccacagtccctgagaagttcttgggaagggtgggcaattgccatgtgtgcctagagaaggttgtttgtaatactgccaagtgccatgtggtgtgatattggctccatgtgccttgtttgtaataacatttccatgtgtcttgggaagaaccatatataagcagagctggtttagtgaaccctcagataggcctagaccatggccagcagtgagaatgtcataacagagttcatgagattcaaggtgaggatggagggaactgtcaatggtcatgagtttgagattgaaggggaaggggagggcagaccctatgagggccacaacacagtcaaattgaaggtgaccaaagggggaccccttccctttgcctgggacatcctgagcccacagtttcagtatggttccaaagtttatgtaaagcaccctgctgacatccctgactacaagaaactgtccttcccagaaggattcaagtgggaaagggtcatgaactttgaggatggaggggttgcaacagtgacccaggacagttctctccaagatggctgtttcatctacaaggtaaaattcattggtgtgaactttccctctgatggcccagtgatgcaaaaaaagaccatgggctgggaagcctcaacagaaaggctgtaccctagagatggagttctcaagggtgagacccacaaagctctaaagctcaaagatgggggccactatctggtggagttcaagagcatctacatggcaaaaaagccagtgcagttgcctggctattactatgtggatgccaagcttgacataacctcacacaatgaagactacactattgtggaacagtatgagaggactgagggaagacatcatctgtttctgtgaattcgcactgcatggacttacctgcctggtggtatcagtcacaggctctgataaggattcagctgttgtataaataaagcatgcagcctagcaggaaccatgttaatctctcttggttgtttccttggaatactcctaagcacattaggtttttagatctgtagaaaagatcaaaggatcttcttgagatcctttttttctgcgcgtaatctgctgcttgcaaacaaaaaaaccaccgctaccagcggtggtttgtttgccggatcaagagctaccaactctttttccgaaggtaactggcttcagcagagcgcagataccaaatactgtccttctagtgtagccgtagttaggccaccacttcaagaactctgtagcaccgcctacatacctcgctctgctaatcctgttaccagtggctgctgccagtggcgataagtcgtgtcttaccgggttggactcaagacgatagttaccggataaggcgcagcggtcgggctgaacggggggttcgtgcacacagcccagcttggagcgaacgacctacaccgaactgagatacctacagcgtgagctatgagaaagcgccacgcttcccgaagggagaaaggcggacaggtatccggtaagcggcagggtcggaacaggagagcgcacgagggagcttccagggggaaacgcctggtatctttatagtcctgtcgggtttcgccacctctgacttgagcgtcgatttttgtgatgctcgtcaggggggcggagcctatggaaaaacgccagcaacgcggcctttttacgg

SEQ ID NO: 631 - DNA, 7343 bp, Artificial Sequence
  pCzGFP-I-T(L103P/E108L)-BB3
  CDS (1917)...(4040): Large T Antigen (L103P/E108L)
ttcctattaatagtaatcaattacggggtcattagttcatagcccatatatggagttccgcgttacataacttacggtaaatggcccgcctggctgaccgcccaacgacccccgcccattgacgtcaataatgacgtatgttcccatagtaacgccaatagggactttccattgacgtcaatgggtggagtatttacggtaaactgcccacttggcagtacatcaagtgtatcatatgccaagtacgccccctattgacgtcaatgacggtaaatggcccgcctggcattatgcccagtacatgaccttatgggactttcctacttggcagtacatctacgtattagtcatcgctattaccatggtgatgcggttttggcagtacatcaatgggcgtggatagcggtttgactcacggggatttccaagtctccaccccattgacgtcaatgggagtttgttttggcaccaaaatcaacgggactttccaaaatgtcgtaacaactccgccccattgacgcaaatgggcggtaggcgtgtacggtgggaggtctatataagcagagctggtttagtgaaccgtcagatccgctagctagaccatggtgagcaagggagaggaactctttacaggtgtggtcccaattctggtggagctggatggagatgtgaatgggcacaaattttctgtcagtggagagggagagggggatgctacctatggcaaactgactctgaagttcatctgcactactggcaagctgcctgtgccatggccaactctggtgacaaccctcacctatggagtccagtgcttttccagatatcctgaccacatgaaacagcatgactttttcaaatctgcaatgcctgagggctatgtgcaagagagaactatctttttcaaggatgatgggaactataagactagggctgaggtgaaatttgaaggagacaccctggtcaataggattgagctcaaggggattgacttcaaggaggatggcaacattctgggccataagctggagtataattacaattcccacaatgtctacattatggctgacaagcagaagaatggcattaaggtcaacttcaagattagacacaacatagaggatggatctgtgcagctggctgaccattaccagcagaatacacctattggggatgggccagtgctgctccctgacaatcactatctgagcacccaatctgctttgtctaaagatcctaatgaaaagagagatcacatggtgctgctggagtttgtaactgctgcaggaattaccttgggtatggatgaactctataagtaaggatccgcccctctccctcccccccccctaacgttactggccgaagccgcttggaataaggccggtgtgcgtttgtctatatgttattttccaccatattgccgtcttttggcaatgtgagggcccggaaacctggccctgtcttcttgacgagcattcctaggggtctttcccctctcgccaaaggaatgcaaggtctgttgaatgtcgtgaaggaagcagttcctctggaagcttcttgaagacaaacaacgtctgtagcgaccctttgcaggcagcggaaccccccacctggcgacaggtgcctctgcggccaaaagccacgtgtataagatacacctgcaaaggcggcacaaccccagtgccacgttgtgagttggatagttgtggaaagagtcaaatggctctcctcaagcgtattcaacaaggggctgaaggatgcccagaaggtaccccattgtatgggatctgatctggggcctcggtgcacatgctttacatgtgtttagtcgaggttaaaaaaacgtctaggccccccgaaccacggggacgtggttttcctttgaaaaacacgatgataatatggccacaaccatggacaaagtgctgaatagggaggaaagtctgcaactgatggatctgttgggacttgagaggtctgcatggggtaatatcccacttatgaggaaagcatacctgaagaagtgtaaagagttccatcctgacaaaggtggagatgaagagaagatgaaaaagatgaacacactgtataagaaaatggaagatggtgtaaagtatgctcaccagccagattttggaggtttttgggatgccacagagatacctacttatggtacagatgagtgggaacagtggtggaatgcatttaatgaagagaatcccttttgctctgagttaatgcctagttctgatgatgaggccacagctgactcccagcacagtactccacccaagaaaaagagaaaagtggaagacccaaaggatttcccctctgaactcttgtccttcttgtctcatgcagtgttctcaaataggaccctggcttgctttgctatctacactactaaggagaaggcagctctcttgtacaagaaaatcatggaaaagtattctgtcacctttatttccaggcacaactcctataatcataatattctctttttcttgacaccccataggcatagggtgagtgcaattaacaactatgctcagaagttgtgtactttctccttcctgatctgtaagggtgtgaataaggagtatctcatgtattcagccctgaccagagacccctttagtgtgattgaagaatccctgcctggtgggctcaaggagcatgatttcaacccagaagaggctgaagaaacaaaacaggtgagctggaagcttgtgactgaatatgcaatggagacaaagtgtgatgatgtcctgctcctcctgggaatgtacctggaatttcagtatagctttgaaatgtgtctgaaatgtatcaaaaaggaacagccttctcattataagtatcatgaaaagcactatgccaatgcagctatatttgcagattctaaaaaccagaaaaccatttgtcagcaagctgttgacacagttctggccaagaaaagagtagactctctccagcttaccagggagcagatgttgacaaataggttcaatgaccttctggacagaatggacataatgtttggctcaactggatctgcagatatagaggagtggatggctggagtggcctggctgcactgtctcctccctaaaatggacagtgtagtctatgacttccttaagtgtatggtctataatatccctaaaaagagatactggttgttcaagggacccattgattcagggaaaactacccttgctgctgcacttctggaactctgtggtgggaaagctctcaatgtcaacctgccacttgatagactcaactttgagctgggggtggcaattgatcagtttttggtagtgtttgaagatgtgaaaggtacaggaggagagtccagggatttgcctagtggccaaggcatcaacaatctggacaacctcagagactacctggatgggtctgtaaaggtcaaccttgaaaaaaagcatctcaacaagaggactcaaatatttccacctggaatagtcactatgaatgaatattcagtgcccaagaccctccaggctagatttgtcaagcaaattgatttcagacctaaagattatctgaaacattgtttggagaggagtgagttcctccttgagaaaaggattattcagtcaggaatagcactgcttcttatgctgatatggtatagaccagtggctgagtttgcccaaagcattcagagtagaatagttgagtggaaagaaaggcttgacaaggagttttctctttcagtatatcaaaagatgaagttcaatgtggctatgggtattggagtgcttgattggttgagaaacagtgatgatgatgatgaagattctcaggaaaatgctgataaaaatgaggatgggggagagaagaatatggaagattctggtcatgaaactggcattgatagtcagagccaggggagtttccaggctccacagagctcccaaagtgtccatgaccacaaccagccttaccatatatgcagaggttttacttgtttcaagaaacctcccactccccctccagaacctgaaacatgagcggccgcgactctagatcataatcagccataccacacctccccctgaacctgaaaaatcaatgcaattattgttgaaataaagcacccagcaatgcctgggaccatgtaaaactgtcctggttctttccaaggtatagagcatagcccacaggctgatatttctggccagggttggttggaggacagccttgtctataggaagagaatgaggtttttgcactataagggcatgcaagtcagtcccgcccctaactccacctggttgcccatcccgcccctaactccgcccagttccgcccattctccgccccatggctgactaattttttttatttatgcagaggcggaggccgcctcggcctctgagctattccagaagtagtgaggaggcttttttggaggcccttaattaaattgacatatctacctaatttgtgtataataaccctgataaatgcttcaataatattgaaaaaggaagagtcctgtataaaaagaaccagctgtggaatgtgtgtcagttagtaggcttatgcaaagtagcccgcccaagagacaggctgaggcccgcccaccatgatagaacaagatggacttcatgctggatctcctgcagcatgggtggaaagactttttggttatgattgggctcagcagaccattggatgttctgatgctgctgtgttcaggcttagtgcacagggtaggccagtgctctttgtgaagactgatctctctggagctttgaatgaactgcaggatgaggctgctaggctttcatggctggccaccacaggtgtcccttgtgctgcagtgttggatgtggttactgaggctgggagggattggctcctcctgggagaagtgccaggtcaggatctgttgagttctcacctggctccagctgaaaaagtctccataatggcagatgctatgagaaggctgcacacattggacccagctacatgcccatttgaccatcaggccaaacacaggattgagagggccagaacaagaatggaggctgggttggtggaccaggatgaccttgatgaggagcatcagggcctggctccagctgaattgtttgccaggctcaaggctagtatgcctgatggggaggatctggtggtaactcatggtgatgcctgtttgcctaacatcatggtggaaaatggaaggttctctggattcattgattgtggaagactgggtgtagctgacaggtatcaggacatagctcttgcaacaagggatattgcagaggagttgggtggagaatgggctgacaggttcctggtcttgtatggcattgctgccccagacagccaaagaattgctttctataggctgttggatgagtttttctaagctcagcacccacaaagctctcaggtcctaagagacactggcacccatatccatgcatcccttgtataaataaagcatccagcaaagctggtaccatgtaaaactgtcttggttgtttccaaggtatagagcatagctcaataggtttttgactttgtcccgcccctctaagtcctgcacacagatactccaatatgacatacagcatgcttgggaactgagtgcccccatgtgggcagagagcaccatgtgccacagtccctgagaagttcttgggaagggtgggcaattgccatgtgtgcctagagaaggttgtttgtaatactgccaagtgccatgtggtgtgatattggctccatgtgccttgtttgtaataacatttccatgtgtcttgggaagaaccatatataagcagagctggtttagtgaaccctcagataggcctagaccatggccagcagtgagaatgtcataacagagttcatgagattcaaggtgaggatggagggaactgtcaatggtcatgagtttgagattgaaggggaaggggagggcagaccctatgagggccacaacacagtcaaattgaaggtgaccaaagggggaccccttccctttgcctgggacatcctgagcccacagtttcagtatggttccaaagtttatgtaaagcaccctgctgacatccctgactacaagaaactgtccttcccagaaggattcaagtgggaaagggtcatgaactttgaggatggaggggttgcaacagtgacccaggacagttctctccaagatggctgtttcatctacaaggtaaaattcattggtgtgaactttccctctgatggcccagtgatgcaaaaaaagaccatgggctgggaagcctcaacagaaaggctgtaccctagagatggagttctcaagggtgagacccacaaagctctaaagctcaaagatgggggccactatctggtggagttcaagagcatctacatggcaaaaaagccagtgcagttgcctggctattactatgtggatgccaagcttgacataacctcacacaatgaagactacactattgtggaacagtatgagaggactgagggaagacatcatctgtttctgtgaattcgcactgcatggacttacctgcctggtggtatcagtcacaggctctgataaggattcagctgttgtataaataaagcatgcagcctagcaggaaccatgttaatctctcttggttgtttccttggaatactcctaagcacattaggtttttagatctgtagaaaagatcaaaggatcttcttgagatcctttttttctgcgcgtaatctgctgcttgcaaacaaaaaaaccaccgctaccagcggtggtttgtttgccggatcaagagctaccaactctttttccgaaggtaactggcttcagcagagcgcagataccaaatactgtccttctagtgtagccgtagttaggccaccacttcaagaactctgtagcaccgcctacatacctcgctctgctaatcctgttaccagtggctgctgccagtggcgataagtcgtgtcttaccgggttggactcaagacgatagttaccggataaggcgcagcggtcgggctgaacggggggttcgtgcacacagcccagcttggagcgaacgacctacaccgaactgagatacctacagcgtgagctatgagaaagcgccacgcttcccgaagggagaaaggcggacaggtatccggtaagcggcagggtcggaacaggagagcgcacgagggagcttccagggggaaacgcctggtatctttatagtcctgtcgggtttcgccacctctgacttgagcgtcgatttttgtgatgctcgtcaggggggcggagcctatggaaaaacgccagcaacgcggcctttttacgg

SEQ ID NO: 632 - DNA, 7343 bp, Artificial Sequence
  pCzGFP-I-T(C105A/E107L)-BB3
  CDS (1917)...(4040): Large T Antigen (C105A/E107L)
ttcctattaatagtaatcaattacggggtcattagttcatagcccatatatggagttccgcgttacataacttacggtaaatggcccgcctggctgaccgcccaacgacccccgcccattgacgtcaataatgacgtatgttcccatagtaacgccaatagggactttccattgacgtcaatgggtggagtatttacggtaaactgcccacttggcagtacatcaagtgtatcatatgccaagtacgccccctattgacgtcaatgacggtaaatggcccgcctggcattatgcccagtacatgaccttatgggactttcctacttggcagtacatctacgtattagtcatcgctattaccatggtgatgcggttttggcagtacatcaatgggcgtggatagcggtttgactcacggggatttccaagtctccaccccattgacgtcaatgggagtttgttttggcaccaaaatcaacgggactttccaaaatgtcgtaacaactccgccccattgacgcaaatgggcggtaggcgtgtacggtgggaggtctatataagcagagctggtttagtgaaccgtcagatccgctagctagaccatggtgagcaagggagaggaactctttacaggtgtggtcccaattctggtggagctggatggagatgtgaatgggcacaaattttctgtcagtggagagggagagggggatgctacctatggcaaactgactctgaagttcatctgcactactggcaagctgcctgtgccatggccaactctggtgacaaccctcacctatggagtccagtgcttttccagatatcctgaccacatgaaacagcatgactttttcaaatctgcaatgcctgagggctatgtgcaagagagaactatctttttcaaggatgatgggaactataagactagggctgaggtgaaatttgaaggagacaccctggtcaataggattgagctcaaggggattgacttcaaggaggatggcaacattctgggccataagctggagtataattacaattcccacaatgtctacattatggctgacaagcagaagaatggcattaaggtcaacttcaagattagacacaacatagaggatggatctgtgcagctggctgaccattaccagcagaatacacctattggggatgggccagtgctgctccctgacaatcactatctgagcacccaatctgctttgtctaaagatcctaatgaaaagagagatcacatggtgctgctggagtttgtaactgctgcaggaattaccttgggtatggatgaactctataagtaaggatccgcccctctccctcccccccccctaacgttactggccgaagccgcttggaataaggccggtgtgcgtttgtctatatgttattttccaccatattgccgtcttttggcaatgtgagggcccggaaacctggccctgtcttcttgacgagcattcctaggggtctttcccctctcgccaaaggaatgcaaggtctgttgaatgtcgtgaaggaagcagttcctctggaagcttcttgaagacaaacaacgtctgtagcgaccctttgcaggcagcggaaccccccacctggcgacaggtgcctctgcggccaaaagccacgtgtataagatacacctgcaaaggcggcacaaccccagtgccacgttgtgagttggatagttgtggaaagagtcaaatggctctcctcaagcgtattcaacaaggggctgaaggatgcccagaaggtaccccattgtatgggatctgatctggggcctcggtgcacatgctttacatgtgtttagtcgaggttaaaaaaacgtctaggccccccgaaccacggggacgtggttttcctttgaaaaacacgatgataatatggccacaaccatggacaaagtgctgaatagggaggaaagtctgcaactgatggatctgttgggacttgagaggtctgcatggggtaatatcccacttatgaggaaagcatacctgaagaagtgtaaagagttccatcctgacaaaggtggagatgaagagaagatgaaaaagatgaacacactgtataagaaaatggaagatggtgtaaagtatgctcaccagccagattttggaggtttttgggatgccacagagatacctacttatggtacagatgagtgggaacagtggtggaatgcatttaatgaagagaatttgtttgcctctaaggaaatgcctagttctgatgatgaggccacagctgactcccagcacagtactccacccaagaaaaagagaaaagtggaagacccaaaggatttcccctctgaactcttgtccttcttgtctcatgcagtgttctcaaataggaccctggcttgctttgctatctacactactaaggagaaggcagctctcttgtacaagaaaatcatggaaaagtattctgtcacctttatttccaggcacaactcctataatcataatattctctttttcttgacaccccataggcatagggtgagtgcaattaacaactatgctcagaagttgtgtactttctccttcctgatctgtaagggtgtgaataaggagtatctcatgtattcagccctgaccagagacccctttagtgtgattgaagaatccctgcctggtgggctcaaggagcatgatttcaacccagaagaggctgaagaaacaaaacaggtgagctggaagcttgtgactgaatatgcaatggagacaaagtgtgatgatgtcctgctcctcctgggaatgtacctggaatttcagtatagctttgaaatgtgtctgaaatgtatcaaaaaggaacagccttctcattataagtatcatgaaaagcactatgccaatgcagctatatttgcagattctaaaaaccagaaaaccatttgtcagcaagctgttgacacagttctggccaagaaaagagtagactctctccagcttaccagggagcagatgttgacaaataggttcaatgaccttctggacagaatggacataatgtttggctcaactggatctgcagatatagaggagtggatggctggagtggcctggctgcactgtctcctccctaaaatggacagtgtagtctatgacttccttaagtgtatggtctataatatccctaaaaagagatactggttgttcaagggacccattgattcagggaaaactacccttgctgctgcacttctggaactctgtggtgggaaagctctcaatgtcaacctgccacttgatagactcaactttgagctgggggtggcaattgatcagtttttggtagtgtttgaagatgtgaaaggtacaggaggagagtccagggatttgcctagtggccaaggcatcaacaatctggacaacctcagagactacctggatgggtctgtaaaggtcaaccttgaaaaaaagcatctcaacaagaggactcaaatatttccacctggaatagtcactatgaatgaatattcagtgcccaagaccctccaggctagatttgtcaagcaaattgatttcagacctaaagattatctgaaacattgtttggagaggagtgagttcctccttgagaaaaggattattcagtcaggaatagcactgcttcttatgctgatatggtatagaccagtggctgagtttgcccaaagcattcagagtagaatagttgagtggaaagaaaggcttgacaaggagttttctctttcagtatatcaaaagatgaagttcaatgtggctatgggtattggagtgcttgattggttgagaaacagtgatgatgatgatgaagattctcaggaaaatgctgataaaaatgaggatgggggagagaagaatatggaagattctggtcatgaaactggcattgatagtcagagccaggggagtttccaggctccacagagctcccaaagtgtccatgaccacaaccagccttaccatatatgcagaggttttacttgtttcaagaaacctcccactccccctccagaacctgaaacatgagcggccgcgactctagatcataatcagccataccacacctccccctgaacctgaaaaatcaatgcaattattgttgaaataaagcacccagcaatgcctgggaccatgtaaaactgtcctggttctttccaaggtatagagcatagcccacaggctgatatttctggccagggttggttggaggacagccttgtctataggaagagaatgaggtttttgcactataagggcatgcaagtcagtcccgcccctaactccacctggttgcccatcccgcccctaactccgcccagttccgcccattctccgccccatggctgactaattttttttatttatgcagaggcggaggccgcctcggcctctgagctattccagaagtagtgaggaggcttttttggaggcccttaattaaattgacatatctacctaatttgtgtataataaccctgataaatgcttcaataatattgaaaaaggaagagtcctgtataaaaagaaccagctgtggaatgtgtgtcagttagtaggcttatgcaaagtagcccgcccaagagacaggctgaggcccgcccaccatgatagaacaagatggacttcatgctggatctcctgcagcatgggtggaaagactttttggttatgattgggctcagcagaccattggatgttctgatgctgctgtgttcaggcttagtgcacagggtaggccagtgctctttgtgaagactgatctctctggagctttgaatgaactgcaggatgaggctgctaggctttcatggctggccaccacaggtgtcccttgtgctgcagtgttggatgtggttactgaggctgggagggattggctcctcctgggagaagtgccaggtcaggatctgttgagttctcacctggctccagctgaaaaagtctccataatggcagatgctatgagaaggctgcacacattggacccagctacatgcccatttgaccatcaggccaaacacaggattgagagggccagaacaagaatggaggctgggttggtggaccaggatgaccttgatgaggagcatcagggcctggctccagctgaattgtttgccaggctcaaggctagtatgcctgatggggaggatctggtggtaactcatggtgatgcctgtttgcctaacatcatggtggaaaatggaaggttctctggattcattgattgtggaagactgggtgtagctgacaggtatcaggacatagctcttgcaacaagggatattgcagaggagttgggtggagaatgggctgacaggttcctggtcttgtatggcattgctgccccagacagccaaagaattgctttctataggctgttggatgagtttttctaagctcagcacccacaaagctctcaggtcctaagagacactggcacccatatccatgcatcccttgtataaataaagcatccagcaaagctggtaccatgtaaaactgtcttggttgtttccaaggtatagagcatagctcaataggtttttgactttgtcccgcccctctaagtcctgcacacagatactccaatatgacatacagcatgcttgggaactgagtgcccccatgtgggcagagagcaccatgtgccacagtccctgagaagttcttgggaagggtgggcaattgccatgtgtgcctagagaaggttgtttgtaatactgccaagtgccatgtggtgtgatattggctccatgtgccttgtttgtaataacatttccatgtgtcttgggaagaaccatatataagcagagctggtttagtgaaccctcagataggcctagaccatggccagcagtgagaatgtcataacagagttcatgagattcaaggtgaggatggagggaactgtcaatggtcatgagtttgagattgaaggggaaggggagggcagaccctatgagggccacaacacagtcaaattgaaggtgaccaaagggggaccccttccctttgcctgggacatcctgagcccacagtttcagtatggttccaaagtttatgtaaagcaccctgctgacatccctgactacaagaaactgtccttcccagaaggattcaagtgggaaagggtcatgaactttgaggatggaggggttgcaacagtgacccaggacagttctctccaagatggctgtttcatctacaaggtaaaattcattggtgtgaactttccctctgatggcccagtgatgcaaaaaaagaccatgggctgggaagcctcaacagaaaggctgtaccctagagatggagttctcaagggtgagacccacaaagctctaaagctcaaagatgggggccactatctggtggagttcaagagcatctacatggcaaaaaagccagtgcagttgcctggctattactatgtggatgccaagcttgacataacctcacacaatgaagactacactattgtggaacagtatgagaggactgagggaagacatcatctgtttctgtgaattcgcactgcatggacttacctgcctggtggtatcagtcacaggctctgataaggattcagctgttgtataaataaagcatgcagcctagcaggaaccatgttaatctctcttggttgtttccttggaatactcctaagcacattaggtttttagatctgtagaaaagatcaaaggatcttcttgagatcctttttttctgcgcgtaatctgctgcttgcaaacaaaaaaaccaccgctaccagcggtggtttgtttgccggatcaagagctaccaactctttttccgaaggtaactggcttcagcagagcgcagataccaaatactgtccttctagtgtagccgtagttaggccaccacttcaagaactctgtagcaccgcctacatacctcgctctgctaatcctgttaccagtggctgctgccagtggcgataagtcgtgtcttaccgggttggactcaagacgatagttaccggataaggcgcagcggtcgggctgaacggggggttcgtgcacacagcccagcttggagcgaacgacctacaccgaactgagatacctacagcgtgagctatgagaaagcgccacgcttcccgaagggagaaaggcggacaggtatccggtaagcggcagggtcggaacaggagagcgcacgagggagcttccagggggaaacgcctggtatctttatagtcctgtcgggtttcgccacctctgacttgagcgtcgatttttgtgatgctcgtcaggggggcggagcctatggaaaaacgccagcaacgcggcctttttacgg

SEQ ID NO: 633 - DNA, 7343 bp, Artificial Sequence
  pCzGFP-I-T(C105A/E108L)-BB3
  CDS (1917)...(4040): Large T Antigen (C105A/E108L)
ttcctattaatagtaatcaattacggggtcattagttcatagcccatatatggagttccgcgttacataacttacggtaaatggcccgcctggctgaccgcccaacgacccccgcccattgacgtcaataatgacgtatgttcccatagtaacgccaatagggactttccattgacgtcaatgggtggagtatttacggtaaactgcccacttggcagtacatcaagtgtatcatatgccaagtacgccccctattgacgtcaatgacggtaaatggcccgcctggcattatgcccagtacatgaccttatgggactttcctacttggcagtacatctacgtattagtcatcgctattaccatggtgatgcggttttggcagtacatcaatgggcgtggatagcggtttgactcacggggatttccaagtctccaccccattgacgtcaatgggagtttgttttggcaccaaaatcaacgggactttccaaaatgtcgtaacaactccgccccattgacgcaaatgggcggtaggcgtgtacggtgggaggtctatataagcagagctggtttagtgaaccgtcagatccgctagctagaccatggtgagcaagggagaggaactctttacaggtgtggtcccaattctggtggagctggatggagatgtgaatgggcacaaattttctgtcagtggagagggagagggggatgctacctatggcaaactgactctgaagttcatctgcactactggcaagctgcctgtgccatggccaactctggtgacaaccctcacctatggagtccagtgcttttccagatatcctgaccacatgaaacagcatgactttttcaaatctgcaatgcctgagggctatgtgcaagagagaactatctttttcaaggatgatgggaactataagactagggctgaggtgaaatttgaaggagacaccctggtcaataggattgagctcaaggggattgacttcaaggaggatggcaacattctgggccataagctggagtataattacaattcccacaatgtctacattatggctgacaagcagaagaatggcattaaggtcaacttcaagattagacacaacatagaggatggatctgtgcagctggctgaccattaccagcagaatacacctattggggatgggccagtgctgctccctgacaatcactatctgagcacccaatctgctttgtctaaagatcctaatgaaaagagagatcacatggtgctgctggagtttgtaactgctgcaggaattaccttgggtatggatgaactctataagtaaggatccgcccctctccctcccccccccctaacgttactggccgaagccgcttggaataaggccggtgtgcgtttgtctatatgttattttccaccatattgccgtcttttggcaatgtgagggcccggaaacctggccctgtcttcttgacgagcattcctaggggtctttcccctctcgccaaaggaatgcaaggtctgttgaatgtcgtgaaggaagcagttcctctggaagcttcttgaagacaaacaacgtctgtagcgaccctttgcaggcagcggaaccccccacctggcgacaggtgcctctgcggccaaaagccacgtgtataagatacacctgcaaaggcggcacaaccccagtgccacgttgtgagttggatagttgtggaaagagtcaaatggctctcctcaagcgtattcaacaaggggctgaaggatgcccagaaggtaccccattgtatgggatctgatctggggcctcggtgcacatgctttacatgtgtttagtcgaggttaaaaaaacgtctaggccccccgaaccacggggacgtggttttcctttgaaaaacacgatgataatatggccacaaccatggacaaagtgctgaatagggaggaaagtctgcaactgatggatctgttgggacttgagaggtctgcatggggtaatatcccacttatgaggaaagcatacctgaagaagtgtaaagagttccatcctgacaaaggtggagatgaagagaagatgaaaaagatgaacacactgtataagaaaatggaagatggtgtaaagtatgctcaccagccagattttggaggtttttgggatgccacagagatacctacttatggtacagatgagtgggaacagtggtggaatgcatttaatgaagagaatttgtttgcctctgagttaatgcctagttctgatgatgaggccacagctgactcccagcacagtactccacccaagaaaaagagaaaagtggaagacccaaaggatttcccctctgaactcttgtccttcttgtctcatgcagtgttctcaaataggaccctggcttgctttgctatctacactactaaggagaaggcagctctcttgtacaagaaaatcatggaaaagtattctgtcacctttatttccaggcacaactcctataatcataatattctctttttcttgacaccccataggcatagggtgagtgcaattaacaactatgctcagaagttgtgtactttctccttcctgatctgtaagggtgtgaataaggagtatctcatgtattcagccctgaccagagacccctttagtgtgattgaagaatccctgcctggtgggctcaaggagcatgatttcaacccagaagaggctgaagaaacaaaacaggtgagctggaagcttgtgactgaatatgcaatggagacaaagtgtgatgatgtcctgctcctcctgggaatgtacctggaatttcagtatagctttgaaatgtgtctgaaatgtatcaaaaaggaacagccttctcattataagtatcatgaaaagcactatgccaatgcagctatatttgcagattctaaaaaccagaaaaccatttgtcagcaagctgttgacacagttctggccaagaaaagagtagactctctccagcttaccagggagcagatgttgacaaataggttcaatgaccttctggacagaatggacataatgtttggctcaactggatctgcagatatagaggagtggatggctggagtggcctggctgcactgtctcctccctaaaatggacagtgtagtctatgacttccttaagtgtatggtctataatatccctaaaaagagatactggttgttcaagggacccattgattcagggaaaactacccttgctgctgcacttctggaactctgtggtgggaaagctctcaatgtcaacctgccacttgatagactcaactttgagctgggggtggcaattgatcagtttttggtagtgtttgaagatgtgaaaggtacaggaggagagtccagggatttgcctagtggccaaggcatcaacaatctggacaacctcagagactacctggatgggtctgtaaaggtcaaccttgaaaaaaagcatctcaacaagaggactcaaatatttccacctggaatagtcactatgaatgaatattcagtgcccaagaccctccaggctagatttgtcaagcaaattgatttcagacctaaagattatctgaaacattgtttggagaggagtgagttcctccttgagaaaaggattattcagtcaggaatagcactgcttcttatgctgatatggtatagaccagtggctgagtttgcccaaagcattcagagtagaatagttgagtggaaagaaaggcttgacaaggagttttctctttcagtatatcaaaagatgaagttcaatgtggctatgggtattggagtgcttgattggttgagaaacagtgatgatgatgatgaagattctcaggaaaatgctgataaaaatgaggatgggggagagaagaatatggaagattctggtcatgaaactggcattgatagtcagagccaggggagtttccaggctccacagagctcccaaagtgtccatgaccacaaccagccttaccatatatgcagaggttttacttgtttcaagaaacctcccactccccctccagaacctgaaacatgagcggccgcgactctagatcataatcagccataccacacctccccctgaacctgaaaaatcaatgcaattattgttgaaataaagcacccagcaatgcctgggaccatgtaaaactgtcctggttctttccaaggtatagagcatagcccacaggctgatatttctggccagggttggttggaggacagccttgtctataggaagagaatgaggtttttgcactataagggcatgcaagtcagtcccgcccctaactccacctggttgcccatcccgcccctaactccgcccagttccgcccattctccgccccatggctgactaattttttttatttatgcagaggcggaggccgcctcggcctctgagctattccagaagtagtgaggaggcttttttggaggcccttaattaaattgacatatctacctaatttgtgtataataaccctgataaatgcttcaataatattgaaaaaggaagagtcctgtataaaaagaaccagctgtggaatgtgtgtcagttagtaggcttatgcaaagtagcccgcccaagagacaggctgaggcccgcccaccatgatagaacaagatggacttcatgctggatctcctgcagcatgggtggaaagactttttggttatgattgggctcagcagaccattggatgttctgatgctgctgtgttcaggcttagtgcacagggtaggccagtgctctttgtgaagactgatctctctggagctttgaatgaactgcaggatgaggctgctaggctttcatggctggccaccacaggtgtcccttgtgctgcagtgttggatgtggttactgaggctgggagggattggctcctcctgggagaagtgccaggtcaggatctgttgagttctcacctggctccagctgaaaaagtctccataatggcagatgctatgagaaggctgcacacattggacccagctacatgcccatttgaccatcaggccaaacacaggattgagagggccagaacaagaatggaggctgggttggtggaccaggatgaccttgatgaggagcatcagggcctggctccagctgaattgtttgccaggctcaaggctagtatgcctgatggggaggatctggtggtaactcatggtgatgcctgtttgcctaacatcatggtggaaaatggaaggttctctggattcattgattgtggaagactgggtgtagctgacaggtatcaggacatagctcttgcaacaagggatattgcagaggagttgggtggagaatgggctgacaggttcctggtcttgtatggcattgctgccccagacagccaaagaattgctttctataggctgttggatgagtttttctaagctcagcacccacaaagctctcaggtcctaagagacactggcacccatatccatgcatcccttgtataaataaagcatccagcaaagctggtaccatgtaaaactgtcttggttgtttccaaggtatagagcatagctcaataggtttttgactttgtcccgcccctctaagtcctgcacacagatactccaatatgacatacagcatgcttgggaactgagtgcccccatgtgggcagagagcaccatgtgccacagtccctgagaagttcttgggaagggtgggcaattgccatgtgtgcctagagaaggttgtttgtaatactgccaagtgccatgtggtgtgatattggctccatgtgccttgtttgtaataacatttccatgtgtcttgggaagaaccatatataagcagagctggtttagtgaaccctcagataggcctagaccatggccagcagtgagaatgtcataacagagttcatgagattcaaggtgaggatggagggaactgtcaatggtcatgagtttgagattgaaggggaaggggagggcagaccctatgagggccacaacacagtcaaattgaaggtgaccaaagggggaccccttccctttgcctgggacatcctgagcccacagtttcagtatggttccaaagtttatgtaaagcaccctgctgacatccctgactacaagaaactgtccttcccagaaggattcaagtgggaaagggtcatgaactttgaggatggaggggttgcaacagtgacccaggacagttctctccaagatggctgtttcatctacaaggtaaaattcattggtgtgaactttccctctgatggcccagtgatgcaaaaaaagaccatgggctgggaagcctcaacagaaaggctgtaccctagagatggagttctcaagggtgagacccacaaagctctaaagctcaaagatgggggccactatctggtggagttcaagagcatctacatggcaaaaaagccagtgcagttgcctggctattactatgtggatgccaagcttgacataacctcacacaatgaagactacactattgtggaacagtatgagaggactgagggaagacatcatctgtttctgtgaattcgcactgcatggacttacctgcctggtggtatcagtcacaggctctgataaggattcagctgttgtataaataaagcatgcagcctagcaggaaccatgttaatctctcttggttgtttccttggaatactcctaagcacattaggtttttagatctgtagaaaagatcaaaggatcttcttgagatcctttttttctgcgcgtaatctgctgcttgcaaacaaaaaaaccaccgctaccagcggtggtttgtttgccggatcaagagctaccaactctttttccgaaggtaactggcttcagcagagcgcagataccaaatactgtccttctagtgtagccgtagttaggccaccacttcaagaactctgtagcaccgcctacatacctcgctctgctaatcctgttaccagtggctgctgccagtggcgataagtcgtgtcttaccgggttggactcaagacgatagttaccggataaggcgcagcggtcgggctgaacggggggttcgtgcacacagcccagcttggagcgaacgacctacaccgaactgagatacctacagcgtgagctatgagaaagcgccacgcttcccgaagggagaaaggcggacaggtatccggtaagcggcagggtcggaacaggagagcgcacgagggagcttccagggggaaacgcctggtatctttatagtcctgtcgggtttcgccacctctgacttgagcgtcgatttttgtgatgctcgtcaggggggcggagcctatggaaaaacgccagcaacgcggcctttttacgg

SEQ ID NO: 634 - DNA, 7343 bp, Artificial Sequence
  pCzGFP-I-T(E107L/E108L)-BB3
  CDS (1917)...(4040): Large T Antigen (E107L/E108L)
ttcctattaatagtaatcaattacggggtcattagttcatagcccatatatggagttccgcgttacataacttacggtaaatggcccgcctggctgaccgcccaacgacccccgcccattgacgtcaataatgacgtatgttcccatagtaacgccaatagggactttccattgacgtcaatgggtggagtatttacggtaaactgcccacttggcagtacatcaagtgtatcatatgccaagtacgccccctattgacgtcaatgacggtaaatggcccgcctggcattatgcccagtacatgaccttatgggactttcctacttggcagtacatctacgtattagtcatcgctattaccatggtgatgcggttttggcagtacatcaatgggcgtggatagcggtttgactcacggggatttccaagtctccaccccattgacgtcaatgggagtttgttttggcaccaaaatcaacgggactttccaaaatgtcgtaacaactccgccccattgacgcaaatgggcggtaggcgtgtacggtgggaggtctatataagcagagctggtttagtgaaccgtcagatccgctagctagaccatggtgagcaagggagaggaactctttacaggtgtggtcccaattctggtggagctggatggagatgtgaatgggcacaaattttctgtcagtggagagggagagggggatgctacctatggcaaactgactctgaagttcatctgcactactggcaagctgcctgtgccatggccaactctggtgacaaccctcacctatggagtccagtgcttttccagatatcctgaccacatgaaacagcatgactttttcaaatctgcaatgcctgagggctatgtgcaagagagaactatctttttcaaggatgatgggaactataagactagggctgaggtgaaatttgaaggagacaccctggtcaataggattgagctcaaggggattgacttcaaggaggatggcaacattctgggccataagctggagtataattacaattcccacaatgtctacattatggctgacaagcagaagaatggcattaaggtcaacttcaagattagacacaacatagaggatggatctgtgcagctggctgaccattaccagcagaatacacctattggggatgggccagtgctgctccctgacaatcactatctgagcacccaatctgctttgtctaaagatcctaatgaaaagagagatcacatggtgctgctggagtttgtaactgctgcaggaattaccttgggtatggatgaactctataagtaaggatccgcccctctccctcccccccccctaacgttactggccgaagccgcttggaataaggccggtgtgcgtttgtctatatgttattttccaccatattgccgtcttttggcaatgtgagggcccggaaacctggccctgtcttcttgacgagcattcctaggggtctttcccctctcgccaaaggaatgcaaggtctgttgaatgtcgtgaaggaagcagttcctctggaagcttcttgaagacaaacaacgtctgtagcgaccctttgcaggcagcggaaccccccacctggcgacaggtgcctctgcggccaaaagccacgtgtataagatacacctgcaaaggcggcacaaccccagtgccacgttgtgagttggatagttgtggaaagagtcaaatggctctcctcaagcgtattcaacaaggggctgaaggatgcccagaaggtaccccattgtatgggatctgatctggggcctcggtgcacatgctttacatgtgtttagtcgaggttaaaaaaacgtctaggccccccgaaccacggggacgtggttttcctttgaaaaacacgatgataatatggccacaaccatggacaaagtgctgaatagggaggaaagtctgcaactgatggatctgttgggacttgagaggtctgcatggggtaatatcccacttatgaggaaagcatacctgaagaagtgtaaagagttccatcctgacaaaggtggagatgaagagaagatgaaaaagatgaacacactgtataagaaaatggaagatggtgtaaagtatgctcaccagccagattttggaggtttttgggatgccacagagatacctacttatggtacagatgagtgggaacagtggtggaatgcatttaatgaagagaatttgttttgctctctgttaatgcctagttctgatgatgaggccacagctgactcccagcacagtactccacccaagaaaaagagaaaagtggaagacccaaaggatttcccctctgaactcttgtccttcttgtctcatgcagtgttctcaaataggaccctggcttgctttgctatctacactactaaggagaaggcagctctcttgtacaagaaaatcatggaaaagtattctgtcacctttatttccaggcacaactcctataatcataatattctctttttcttgacaccccataggcatagggtgagtgcaattaacaactatgctcagaagttgtgtactttctccttcctgatctgtaagggtgtgaataaggagtatctcatgtattcagccctgaccagagacccctttagtgtgattgaagaatccctgcctggtgggctcaaggagcatgatttcaacccagaagaggctgaagaaacaaaacaggtgagctggaagcttgtgactgaatatgcaatggagacaaagtgtgatgatgtcctgctcctcctgggaatgtacctggaatttcagtatagctttgaaatgtgtctgaaatgtatcaaaaaggaacagccttctcattataagtatcatgaaaagcactatgccaatgcagctatatttgcagattctaaaaaccagaaaaccatttgtcagcaagctgttgacacagttctggccaagaaaagagtagactctctccagcttaccagggagcagatgttgacaaataggttcaatgaccttctggacagaatggacataatgtttggctcaactggatctgcagatatagaggagtggatggctggagtggcctggctgcactgtctcctccctaaaatggacagtgtagtctatgacttccttaagtgtatggtctataatatccctaaaaagagatactggttgttcaagggacccattgattcagggaaaactacccttgctgctgcacttctggaactctgtggtgggaaagctctcaatgtcaacctgccacttgatagactcaactttgagctgggggtggcaattgatcagtttttggtagtgtttgaagatgtgaaaggtacaggaggagagtccagggatttgcctagtggccaaggcatcaacaatctggacaacctcagagactacctggatgggtctgtaaaggtcaaccttgaaaaaaagcatctcaacaagaggactcaaatatttccacctggaatagtcactatgaatgaatattcagtgcccaagaccctccaggctagatttgtcaagcaaattgatttcagacctaaagattatctgaaacattgtttggagaggagtgagttcctccttgagaaaaggattattcagtcaggaatagcactgcttcttatgctgatatggtatagaccagtggctgagtttgcccaaagcattcagagtagaatagttgagtggaaagaaaggcttgacaaggagttttctctttcagtatatcaaaagatgaagttcaatgtggctatgggtattggagtgcttgattggttgagaaacagtgatgatgatgatgaagattctcaggaaaatgctgataaaaatgaggatgggggagagaagaatatggaagattctggtcatgaaactggcattgatagtcagagccaggggagtttccaggctccacagagctcccaaagtgtccatgaccacaaccagccttaccatatatgcagaggttttacttgtttcaagaaacctcccactccccctccagaacctgaaacatgagcggccgcgactctagatcataatcagccataccacacctccccctgaacctgaaaaatcaatgcaattattgttgaaataaagcacccagcaatgcctgggaccatgtaaaactgtcctggttctttccaaggtatagagcatagcccacaggctgatatttctggccagggttggttggaggacagccttgtctataggaagagaatgaggtttttgcactataagggcatgcaagtcagtcccgcccctaactccacctggttgcccatcccgcccctaactccgcccagttccgcccattctccgccccatggctgactaattttttttatttatgcagaggcggaggccgcctcggcctctgagctattccagaagtagtgaggaggcttttttggaggcccttaattaaattgacatatctacctaatttgtgtataataaccctgataaatgcttcaataatattgaaaaaggaagagtcctgtataaaaagaaccagctgtggaatgtgtgtcagttagtaggcttatgcaaagtagcccgcccaagagacaggctgaggcccgcccaccatgatagaacaagatggacttcatgctggatctcctgcagcatgggtggaaagactttttggttatgattgggctcagcagaccattggatgttctgatgctgctgtgttcaggcttagtgcacagggtaggccagtgctctttgtgaagactgatctctctggagctttgaatgaactgcaggatgaggctgctaggctttcatggctggccaccacaggtgtcccttgtgctgcagtgttggatgtggttactgaggctgggagggattggctcctcctgggagaagtgccaggtcaggatctgttgagttctcacctggctccagctgaaaaagtctccataatggcagatgctatgagaaggctgcacacattggacccagctacatgcccatttgaccatcaggccaaacacaggattgagagggccagaacaagaatggaggctgggttggtggaccaggatgaccttgatgaggagcatcagggcctggctccagctgaattgtttgccaggctcaaggctagtatgcctgatggggaggatctggtggtaactcatggtgatgcctgtttgcctaacatcatggtggaaaatggaaggttctctggattcattgattgtggaagactgggtgtagctgacaggtatcaggacatagctcttgcaacaagggatattgcagaggagttgggtggagaatgggctgacaggttcctggtcttgtatggcattgctgccccagacagccaaagaattgctttctataggctgttggatgagtttttctaagctcagcacccacaaagctctcaggtcctaagagacactggcacccatatccatgcatcccttgtataaataaagcatccagcaaagctggtaccatgtaaaactgtcttggttgtttccaaggtatagagcatagctcaataggtttttgactttgtcccgcccctctaagtcctgcacacagatactccaatatgacatacagcatgcttgggaactgagtgcccccatgtgggcagagagcaccatgtgccacagtccctgagaagttcttgggaagggtgggcaattgccatgtgtgcctagagaaggttgtttgtaatactgccaagtgccatgtggtgtgatattggctccatgtgccttgtttgtaataacatttccatgtgtcttgggaagaaccatatataagcagagctggtttagtgaaccctcagataggcctagaccatggccagcagtgagaatgtcataacagagttcatgagattcaaggtgaggatggagggaactgtcaatggtcatgagtttgagattgaaggggaaggggagggcagaccctatgagggccacaacacagtcaaattgaaggtgaccaaagggggaccccttccctttgcctgggacatcctgagcccacagtttcagtatggttccaaagtttatgtaaagcaccctgctgacatccctgactacaagaaactgtccttcccagaaggattcaagtgggaaagggtcatgaactttgaggatggaggggttgcaacagtgacccaggacagttctctccaagatggctgtttcatctacaaggtaaaattcattggtgtgaactttccctctgatggcccagtgatgcaaaaaaagaccatgggctgggaagcctcaacagaaaggctgtaccctagagatggagttctcaagggtgagacccacaaagctctaaagctcaaagatgggggccactatctggtggagttcaagagcatctacatggcaaaaaagccagtgcagttgcctggctattactatgtggatgccaagcttgacataacctcacacaatgaagactacactattgtggaacagtatgagaggactgagggaagacatcatctgtttctgtgaattcgcactgcatggacttacctgcctggtggtatcagtcacaggctctgataaggattcagctgttgtataaataaagcatgcagcctagcaggaaccatgttaatctctcttggttgtttccttggaatactcctaagcacattaggtttttagatctgtagaaaagatcaaaggatcttcttgagatcctttttttctgcgcgtaatctgctgcttgcaaacaaaaaaaccaccgctaccagcggtggtttgtttgccggatcaagagctaccaactctttttccgaaggtaactggcttcagcagagcgcagataccaaatactgtccttctagtgtagccgtagttaggccaccacttcaagaactctgtagcaccgcctacatacctcgctctgctaatcctgttaccagtggctgctgccagtggcgataagtcgtgtcttaccgggttggactcaagacgatagttaccggataaggcgcagcggtcgggctgaacggggggttcgtgcacacagcccagcttggagcgaacgacctacaccgaactgagatacctacagcgtgagctatgagaaagcgccacgcttcccgaagggagaaaggcggacaggtatccggtaagcggcagggtcggaacaggagagcgcacgagggagcttccagggggaaacgcctggtatctttatagtcctgtcgggtttcgccacctctgacttgagcgtcgatttttgtgatgctcgtcaggggggcggagcctatggaaaaacgccagcaacgcggcctttttacgg

SEQ ID NO: 635 - DNA, 7343 bp, Artificial Sequence
  pCzGFP-I-T(C105A/E107L/E108L)-BB3
  CDS (1917)...(4040): Large T Antigen (C105A/E107L/E108L)
ttcctattaatagtaatcaattacggggtcattagttcatagcccatatatggagttccgcgttacataacttacggtaaatggcccgcctggctgaccgcccaacgacccccgcccattgacgtcaataatgacgtatgttcccatagtaacgccaatagggactttccattgacgtcaatgggtggagtatttacggtaaactgcccacttggcagtacatcaagtgtatcatatgccaagtacgccccctattgacgtcaatgacggtaaatggcccgcctggcattatgcccagtacatgaccttatgggactttcctacttggcagtacatctacgtattagtcatcgctattaccatggtgatgcggttttggcagtacatcaatgggcgtggatagcggtttgactcacggggatttccaagtctccaccccattgacgtcaatgggagtttgttttggcaccaaaatcaacgggactttccaaaatgtcgtaacaactccgccccattgacgcaaatgggcggtaggcgtgtacggtgggaggtctatataagcagagctggtttagtgaaccgtcagatccgctagctagaccatggtgagcaagggagaggaactctttacaggtgtggtcccaattctggtggagctggatggagatgtgaatgggcacaaattttctgtcagtggagagggagagggggatgctacctatggcaaactgactctgaagttcatctgcactactggcaagctgcctgtgccatggccaactctggtgacaaccctcacctatggagtccagtgcttttccagatatcctgaccacatgaaacagcatgactttttcaaatctgcaatgcctgagggctatgtgcaagagagaactatctttttcaaggatgatgggaactataagactagggctgaggtgaaatttgaaggagacaccctggtcaataggattgagctcaaggggattgacttcaaggaggatggcaacattctgggccataagctggagtataattacaattcccacaatgtctacattatggctgacaagcagaagaatggcattaaggtcaacttcaagattagacacaacatagaggatggatctgtgcagctggctgaccattaccagcagaatacacctattggggatgggccagtgctgctccctgacaatcactatctgagcacccaatctgctttgtctaaagatcctaatgaaaagagagatcacatggtgctgctggagtttgtaactgctgcaggaattaccttgggtatggatgaactctataagtaaggatccgcccctctccctcccccccccctaacgttactggccgaagccgcttggaataaggccggtgtgcgtttgtctatatgttattttccaccatattgccgtcttttggcaatgtgagggcccggaaacctggccctgtcttcttgacgagcattcctaggggtctttcccctctcgccaaaggaatgcaaggtctgttgaatgtcgtgaaggaagcagttcctctggaagcttcttgaagacaaacaacgtctgtagcgaccctttgcaggcagcggaaccccccacctggcgacaggtgcctctgcggccaaaagccacgtgtataagatacacctgcaaaggcggcacaaccccagtgccacgttgtgagttggatagttgtggaaagagtcaaatggctctcctcaagcgtattcaacaaggggctgaaggatgcccagaaggtaccccattgtatgggatctgatctggggcctcggtgcacatgctttacatgtgtttagtcgaggttaaaaaaacgtctaggccccccgaaccacggggacgtggttttcctttgaaaaacacgatgataatatggccacaaccatggacaaagtgctgaatagggaggaaagtctgcaactgatggatctgttgggacttgagaggtctgcatggggtaatatcccacttatgaggaaagcatacctgaagaagtgtaaagagttccatcctgacaaaggtggagatgaagagaagatgaaaaagatgaacacactgtataagaaaatggaagatggtgtaaagtatgctcaccagccagattttggaggtttttgggatgccacagagatacctacttatggtacagatgagtgggaacagtggtggaatgcatttaatgaagagaatttgtttgcctctctgttaatgcctagttctgatgatgaggccacagctgactcccagcacagtactccacccaagaaaaagagaaaagtggaagacccaaaggatttcccctctgaactcttgtccttcttgtctcatgcagtgttctcaaataggaccctggcttgctttgctatctacactactaaggagaaggcagctctcttgtacaagaaaatcatggaaaagtattctgtcacctttatttccaggcacaactcctataatcataatattctctttttcttgacaccccataggcatagggtgagtgcaattaacaactatgctcagaagttgtgtactttctccttcctgatctgtaagggtgtgaataaggagtatctcatgtattcagccctgaccagagacccctttagtgtgattgaagaatccctgcctggtgggctcaaggagcatgatttcaacccagaagaggctgaagaaacaaaacaggtgagctggaagcttgtgactgaatatgcaatggagacaaagtgtgatgatgtcctgctcctcctgggaatgtacctggaatttcagtatagctttgaaatgtgtctgaaatgtatcaaaaaggaacagccttctcattataagtatcatgaaaagcactatgccaatgcagctatatttgcagattctaaaaaccagaaaaccatttgtcagcaagctgttgacacagttctggccaagaaaagagtagactctctccagcttaccagggagcagatgttgacaaataggttcaatgaccttctggacagaatggacataatgtttggctcaactggatctgcagatatagaggagtggatggctggagtggcctggctgcactgtctcctccctaaaatggacagtgtagtctatgacttccttaagtgtatggtctataatatccctaaaaagagatactggttgttcaagggacccattgattcagggaaaactacccttgctgctgcacttctggaactctgtggtgggaaagctctcaatgtcaacctgccacttgatagactcaactttgagctgggggtggcaattgatcagtttttggtagtgtttgaagatgtgaaaggtacaggaggagagtccagggatttgcctagtggccaaggcatcaacaatctggacaacctcagagactacctggatgggtctgtaaaggtcaaccttgaaaaaaagcatctcaacaagaggactcaaatatttccacctggaatagtcactatgaatgaatattcagtgcccaagaccctccaggctagatttgtcaagcaaattgatttcagacctaaagattatctgaaacattgtttggagaggagtgagttcctccttgagaaaaggattattcagtcaggaatagcactgcttcttatgctgatatggtatagaccagtggctgagtttgcccaaagcattcagagtagaatagttgagtggaaagaaaggcttgacaaggagttttctctttcagtatatcaaaagatgaagttcaatgtggctatgggtattggagtgcttgattggttgagaaacagtgatgatgatgatgaagattctcaggaaaatgctgataaaaatgaggatgggggagagaagaatatggaagattctggtcatgaaactggcattgatagtcagagccaggggagtttccaggctccacagagctcccaaagtgtccatgaccacaaccagccttaccatatatgcagaggttttacttgtttcaagaaacctcccactccccctccagaacctgaaacatgagcggccgcgactctagatcataatcagccataccacacctccccctgaacctgaaaaatcaatgcaattattgttgaaataaagcacccagcaatgcctgggaccatgtaaaactgtcctggttctttccaaggtatagagcatagcccacaggctgatatttctggccagggttggttggaggacagccttgtctataggaagagaatgaggtttttgcactataagggcatgcaagtcagtcccgcccctaactccacctggttgcccatcccgcccctaactccgcccagttccgcccattctccgccccatggctgactaattttttttatttatgcagaggcggaggccgcctcggcctctgagctattccagaagtagtgaggaggcttttttggaggcccttaattaaattgacatatctacctaatttgtgtataataaccctgataaatgcttcaataatattgaaaaaggaagagtcctgtataaaaagaaccagctgtggaatgtgtgtcagttagtaggcttatgcaaagtagcccgcccaagagacaggctgaggcccgcccaccatgatagaacaagatggacttcatgctggatctcctgcagcatgggtggaaagactttttggttatgattgggctcagcagaccattggatgttctgatgctgctgtgttcaggcttagtgcacagggtaggccagtgctctttgtgaagactgatctctctggagctttgaatgaactgcaggatgaggctgctaggctttcatggctggccaccacaggtgtcccttgtgctgcagtgttggatgtggttactgaggctgggagggattggctcctcctgggagaagtgccaggtcaggatctgttgagttctcacctggctccagctgaaaaagtctccataatggcagatgctatgagaaggctgcacacattggacccagctacatgcccatttgaccatcaggccaaacacaggattgagagggccagaacaagaatggaggctgggttggtggaccaggatgaccttgatgaggagcatcagggcctggctccagctgaattgtttgccaggctcaaggctagtatgcctgatggggaggatctggtggtaactcatggtgatgcctgtttgcctaacatcatggtggaaaatggaaggttctctggattcattgattgtggaagactgggtgtagctgacaggtatcaggacatagctcttgcaacaagggatattgcagaggagttgggtggagaatgggctgacaggttcctggtcttgtatggcattgctgccccagacagccaaagaattgctttctataggctgttggatgagtttttctaagctcagcacccacaaagctctcaggtcctaagagacactggcacccatatccatgcatcccttgtataaataaagcatccagcaaagctggtaccatgtaaaactgtcttggttgtttccaaggtatagagcatagctcaataggtttttgactttgtcccgcccctctaagtcctgcacacagatactccaatatgacatacagcatgcttgggaactgagtgcccccatgtgggcagagagcaccatgtgccacagtccctgagaagttcttgggaagggtgggcaattgccatgtgtgcctagagaaggttgtttgtaatactgccaagtgccatgtggtgtgatattggctccatgtgccttgtttgtaataacatttccatgtgtcttgggaagaaccatatataagcagagctggtttagtgaaccctcagataggcctagaccatggccagcagtgagaatgtcataacagagttcatgagattcaaggtgaggatggagggaactgtcaatggtcatgagtttgagattgaaggggaaggggagggcagaccctatgagggccacaacacagtcaaattgaaggtgaccaaagggggaccccttccctttgcctgggacatcctgagcccacagtttcagtatggttccaaagtttatgtaaagcaccctgctgacatccctgactacaagaaactgtccttcccagaaggattcaagtgggaaagggtcatgaactttgaggatggaggggttgcaacagtgacccaggacagttctctccaagatggctgtttcatctacaaggtaaaattcattggtgtgaactttccctctgatggcccagtgatgcaaaaaaagaccatgggctgggaagcctcaacagaaaggctgtaccctagagatggagttctcaagggtgagacccacaaagctctaaagctcaaagatgggggccactatctggtggagttcaagagcatctacatggcaaaaaagccagtgcagttgcctggctattactatgtggatgccaagcttgacataacctcacacaatgaagactacactattgtggaacagtatgagaggactgagggaagacatcatctgtttctgtgaattcgcactgcatggacttacctgcctggtggtatcagtcacaggctctgataaggattcagctgttgtataaataaagcatgcagcctagcaggaaccatgttaatctctcttggttgtttccttggaatactcctaagcacattaggtttttagatctgtagaaaagatcaaaggatcttcttgagatcctttttttctgcgcgtaatctgctgcttgcaaacaaaaaaaccaccgctaccagcggtggtttgtttgccggatcaagagctaccaactctttttccgaaggtaactggcttcagcagagcgcagataccaaatactgtccttctagtgtagccgtagttaggccaccacttcaagaactctgtagcaccgcctacatacctcgctctgctaatcctgttaccagtggctgctgccagtggcgataagtcgtgtcttaccgggttggactcaagacgatagttaccggataaggcgcagcggtcgggctgaacggggggttcgtgcacacagcccagcttggagcgaacgacctacaccgaactgagatacctacagcgtgagctatgagaaagcgccacgcttcccgaagggagaaaggcggacaggtatccggtaagcggcagggtcggaacaggagagcgcacgagggagcttccagggggaaacgcctggtatctttatagtcctgtcgggtttcgccacctctgacttgagcgtcgatttttgtgatgctcgtcaggggggcggagcctatggaaaaacgccagcaacgcggcctttttacgg

SEQ ID NO: 636 - DNA, 7343 bp, Artificial Sequence
  pCzGFP-I-T(L103P/E107L/E108L)-BB3
  CDS (1917)...(4040): Large T Antigen (L103P/E107L/E108L)
ttcctattaatagtaatcaattacggggtcattagttcatagcccatatatggagttccgcgttacataacttacggtaaatggcccgcctggctgaccgcccaacgacccccgcccattgacgtcaataatgacgtatgttcccatagtaacgccaatagggactttccattgacgtcaatgggtggagtatttacggtaaactgcccacttggcagtacatcaagtgtatcatatgccaagtacgccccctattgacgtcaatgacggtaaatggcccgcctggcattatgcccagtacatgaccttatgggactttcctacttggcagtacatctacgtattagtcatcgctattaccatggtgatgcggttttggcagtacatcaatgggcgtggatagcggtttgactcacggggatttccaagtctccaccccattgacgtcaatgggagtttgttttggcaccaaaatcaacgggactttccaaaatgtcgtaacaactccgccccattgacgcaaatgggcggtaggcgtgtacggtgggaggtctatataagcagagctggtttagtgaaccgtcagatccgctagctagaccatggtgagcaagggagaggaactctttacaggtgtggtcccaattctggtggagctggatggagatgtgaatgggcacaaattttctgtcagtggagagggagagggggatgctacctatggcaaactgactctgaagttcatctgcactactggcaagctgcctgtgccatggccaactctggtgacaaccctcacctatggagtccagtgcttttccagatatcctgaccacatgaaacagcatgactttttcaaatctgcaatgcctgagggctatgtgcaagagagaactatctttttcaaggatgatgggaactataagactagggctgaggtgaaatttgaaggagacaccctggtcaataggattgagctcaaggggattgacttcaaggaggatggcaacattctgggccataagctggagtataattacaattcccacaatgtctacattatggctgacaagcagaagaatggcattaaggtcaacttcaagattagacacaacatagaggatggatctgtgcagctggctgaccattaccagcagaatacacctattggggatgggccagtgctgctccctgacaatcactatctgagcacccaatctgctttgtctaaagatcctaatgaaaagagagatcacatggtgctgctggagtttgtaactgctgcaggaattaccttgggtatggatgaactctataagtaaggatccgcccctctccctcccccccccctaacgttactggccgaagccgcttggaataaggccggtgtgcgtttgtctatatgttattttccaccatattgccgtcttttggcaatgtgagggcccggaaacctggccctgtcttcttgacgagcattcctaggggtctttcccctctcgccaaaggaatgcaaggtctgttgaatgtcgtgaaggaagcagttcctctggaagcttcttgaagacaaacaacgtctgtagcgaccctttgcaggcagcggaaccccccacctggcgacaggtgcctctgcggccaaaagccacgtgtataagatacacctgcaaaggcggcacaaccccagtgccacgttgtgagttggatagttgtggaaagagtcaaatggctctcctcaagcgtattcaacaaggggctgaaggatgcccagaaggtaccccattgtatgggatctgatctggggcctcggtgcacatgctttacatgtgtttagtcgaggttaaaaaaacgtctaggccccccgaaccacggggacgtggttttcctttgaaaaacacgatgataatatggccacaaccatggacaaagtgctgaatagggaggaaagtctgcaactgatggatctgttgggacttgagaggtctgcatggggtaatatcccacttatgaggaaagcatacctgaagaagtgtaaagagttccatcctgacaaaggtggagatgaagagaagatgaaaaagatgaacacactgtataagaaaatggaagatggtgtaaagtatgctcaccagccagattttggaggtttttgggatgccacagagatacctacttatggtacagatgagtgggaacagtggtggaatgcatttaatgaagagaatcccttttgctctctgttaatgcctagttctgatgatgaggccacagctgactcccagcacagtactccacccaagaaaaagagaaaagtggaagacccaaaggatttcccctctgaactcttgtccttcttgtctcatgcagtgttctcaaataggaccctggcttgctttgctatctacactactaaggagaaggcagctctcttgtacaagaaaatcatggaaaagtattctgtcacctttatttccaggcacaactcctataatcataatattctctttttcttgacaccccataggcatagggtgagtgcaattaacaactatgctcagaagttgtgtactttctccttcctgatctgtaagggtgtgaataaggagtatctcatgtattcagccctgaccagagacccctttagtgtgattgaagaatccctgcctggtgggctcaaggagcatgatttcaacccagaagaggctgaagaaacaaaacaggtgagctggaagcttgtgactgaatatgcaatggagacaaagtgtgatgatgtcctgctcctcctgggaatgtacctggaatttcagtatagctttgaaatgtgtctgaaatgtatcaaaaaggaacagccttctcattataagtatcatgaaaagcactatgccaatgcagctatatttgcagattctaaaaaccagaaaaccatttgtcagcaagctgttgacacagttctggccaagaaaagagtagactctctccagcttaccagggagcagatgttgacaaataggttcaatgaccttctggacagaatggacataatgtttggctcaactggatctgcagatatagaggagtggatggctggagtggcctggctgcactgtctcctccctaaaatggacagtgtagtctatgacttccttaagtgtatggtctataatatccctaaaaagagatactggttgttcaagggacccattgattcagggaaaactacccttgctgctgcacttctggaactctgtggtgggaaagctctcaatgtcaacctgccacttgatagactcaactttgagctgggggtggcaattgatcagtttttggtagtgtttgaagatgtgaaaggtacaggaggagagtccagggatttgcctagtggccaaggcatcaacaatctggacaacctcagagactacctggatgggtctgtaaaggtcaaccttgaaaaaaagcatctcaacaagaggactcaaatatttccacctggaatagtcactatgaatgaatattcagtgcccaagaccctccaggctagatttgtcaagcaaattgatttcagacctaaagattatctgaaacattgtttggagaggagtgagttcctccttgagaaaaggattattcagtcaggaatagcactgcttcttatgctgatatggtatagaccagtggctgagtttgcccaaagcattcagagtagaatagttgagtggaaagaaaggcttgacaaggagttttctctttcagtatatcaaaagatgaagttcaatgtggctatgggtattggagtgcttgattggttgagaaacagtgatgatgatgatgaagattctcaggaaaatgctgataaaaatgaggatgggggagagaagaatatggaagattctggtcatgaaactggcattgatagtcagagccaggggagtttccaggctccacagagctcccaaagtgtccatgaccacaaccagccttaccatatatgcagaggttttacttgtttcaagaaacctcccactccccctccagaacctgaaacatgagcggccgcgactctagatcataatcagccataccacacctccccctgaacctgaaaaatcaatgcaattattgttgaaataaagcacccagcaatgcctgggaccatgtaaaactgtcctggttctttccaaggtatagagcatagcccacaggctgatatttctggccagggttggttggaggacagccttgtctataggaagagaatgaggtttttgcactataagggcatgcaagtcagtcccgcccctaactccacctggttgcccatcccgcccctaactccgcccagttccgcccattctccgccccatggctgactaattttttttatttatgcagaggcggaggccgcctcggcctctgagctattccagaagtagtgaggaggcttttttggaggcccttaattaaattgacatatctacctaatttgtgtataataaccctgataaatgcttcaataatattgaaaaaggaagagtcctgtataaaaagaaccagctgtggaatgtgtgtcagttagtaggcttatgcaaagtagcccgcccaagagacaggctgaggcccgcccaccatgatagaacaagatggacttcatgctggatctcctgcagcatgggtggaaagactttttggttatgattgggctcagcagaccattggatgttctgatgctgctgtgttcaggcttagtgcacagggtaggccagtgctctttgtgaagactgatctctctggagctttgaatgaactgcaggatgaggctgctaggctttcatggctggccaccacaggtgtcccttgtgctgcagtgttggatgtggttactgaggctgggagggattggctcctcctgggagaagtgccaggtcaggatctgttgagttctcacctggctccagctgaaaaagtctccataatggcagatgctatgagaaggctgcacacattggacccagctacatgcccatttgaccatcaggccaaacacaggattgagagggccagaacaagaatggaggctgggttggtggaccaggatgaccttgatgaggagcatcagggcctggctccagctgaattgtttgccaggctcaaggctagtatgcctgatggggaggatctggtggtaactcatggtgatgcctgtttgcctaacatcatggtggaaaatggaaggttctctggattcattgattgtggaagactgggtgtagctgacaggtatcaggacatagctcttgcaacaagggatattgcagaggagttgggtggagaatgggctgacaggttcctggtcttgtatggcattgctgccccagacagccaaagaattgctttctataggctgttggatgagtttttctaagctcagcacccacaaagctctcaggtcctaagagacactggcacccatatccatgcatcccttgtataaataaagcatccagcaaagctggtaccatgtaaaactgtcttggttgtttccaaggtatagagcatagctcaataggtttttgactttgtcccgcccctctaagtcctgcacacagatactccaatatgacatacagcatgcttgggaactgagtgcccccatgtgggcagagagcaccatgtgccacagtccctgagaagttcttgggaagggtgggcaattgccatgtgtgcctagagaaggttgtttgtaatactgccaagtgccatgtggtgtgatattggctccatgtgccttgtttgtaataacatttccatgtgtcttgggaagaaccatatataagcagagctggtttagtgaaccctcagataggcctagaccatggccagcagtgagaatgtcataacagagttcatgagattcaaggtgaggatggagggaactgtcaatggtcatgagtttgagattgaaggggaaggggagggcagaccctatgagggccacaacacagtcaaattgaaggtgaccaaagggggaccccttccctttgcctgggacatcctgagcccacagtttcagtatggttccaaagtttatgtaaagcaccctgctgacatccctgactacaagaaactgtccttcccagaaggattcaagtgggaaagggtcatgaactttgaggatggaggggttgcaacagtgacccaggacagttctctccaagatggctgtttcatctacaaggtaaaattcattggtgtgaactttccctctgatggcccagtgatgcaaaaaaagaccatgggctgggaagcctcaacagaaaggctgtaccctagagatggagttctcaagggtgagacccacaaagctctaaagctcaaagatgggggccactatctggtggagttcaagagcatctacatggcaaaaaagccagtgcagttgcctggctattactatgtggatgccaagcttgacataacctcacacaatgaagactacactattgtggaacagtatgagaggactgagggaagacatcatctgtttctgtgaattcgcactgcatggacttacctgcctggtggtatcagtcacaggctctgataaggattcagctgttgtataaataaagcatgcagcctagcaggaaccatgttaatctctcttggttgtttccttggaatactcctaagcacattaggtttttagatctgtagaaaagatcaaaggatcttcttgagatcctttttttctgcgcgtaatctgctgcttgcaaacaaaaaaaccaccgctaccagcggtggtttgtttgccggatcaagagctaccaactctttttccgaaggtaactggcttcagcagagcgcagataccaaatactgtccttctagtgtagccgtagttaggccaccacttcaagaactctgtagcaccgcctacatacctcgctctgctaatcctgttaccagtggctgctgccagtggcgataagtcgtgtcttaccgggttggactcaagacgatagttaccggataaggcgcagcggtcgggctgaacggggggttcgtgcacacagcccagcttggagcgaacgacctacaccgaactgagatacctacagcgtgagctatgagaaagcgccacgcttcccgaagggagaaaggcggacaggtatccggtaagcggcagggtcggaacaggagagcgcacgagggagcttccagggggaaacgcctggtatctttatagtcctgtcgggtttcgccacctctgacttgagcgtcgatttttgtgatgctcgtcaggggggcggagcctatggaaaaacgccagcaacgcggcctttttacgg

SEQ ID NO: 637 - DNA, 7343 bp, Artificial Sequence
  pCzGFP-I-T(L103P/CA105A/E107L/E108L)-BB3
  CDS (1917)...(4040): Large T Antigen (L103P/C105A/E107L/E108L)
ttcctattaatagtaatcaattacggggtcattagttcatagcccatatatggagttccgcgttacataacttacggtaaatggcccgcctggctgaccgcccaacgacccccgcccattgacgtcaataatgacgtatgttcccatagtaacgccaatagggactttccattgacgtcaatgggtggagtatttacggtaaactgcccacttggcagtacatcaagtgtatcatatgccaagtacgccccctattgacgtcaatgacggtaaatggcccgcctggcattatgcccagtacatgaccttatgggactttcctacttggcagtacatctacgtattagtcatcgctattaccatggtgatgcggttttggcagtacatcaatgggcgtggatagcggtttgactcacggggatttccaagtctccaccccattgacgtcaatgggagtttgttttggcaccaaaatcaacgggactttccaaaatgtcgtaacaactccgccccattgacgcaaatgggcggtaggcgtgtacggtgggaggtctatataagcagagctggtttagtgaaccgtcagatccgctagctagaccatggtgagcaagggagaggaactctttacaggtgtggtcccaattctggtggagctggatggagatgtgaatgggcacaaattttctgtcagtggagagggagagggggatgctacctatggcaaactgactctgaagttcatctgcactactggcaagctgcctgtgccatggccaactctggtgacaaccctcacctatggagtccagtgcttttccagatatcctgaccacatgaaacagcatgactttttcaaatctgcaatgcctgagggctatgtgcaagagagaactatctttttcaaggatgatgggaactataagactagggctgaggtgaaatttgaaggagacaccctggtcaataggattgagctcaaggggattgacttcaaggaggatggcaacattctgggccataagctggagtataattacaattcccacaatgtctacattatggctgacaagcagaagaatggcattaaggtcaacttcaagattagacacaacatagaggatggatctgtgcagctggctgaccattaccagcagaatacacctattggggatgggccagtgctgctccctgacaatcactatctgagcacccaatctgctttgtctaaagatcctaatgaaaagagagatcacatggtgctgctggagtttgtaactgctgcaggaattaccttgggtatggatgaactctataagtaaggatccgcccctctccctcccccccccctaacgttactggccgaagccgcttggaataaggccggtgtgcgtttgtctatatgttattttccaccatattgccgtcttttggcaatgtgagggcccggaaacctggccctgtcttcttgacgagcattcctaggggtctttcccctctcgccaaaggaatgcaaggtctgttgaatgtcgtgaaggaagcagttcctctggaagcttcttgaagacaaacaacgtctgtagcgaccctttgcaggcagcggaaccccccacctggcgacaggtgcctctgcggccaaaagccacgtgtataagatacacctgcaaaggcggcacaaccccagtgccacgttgtgagttggatagttgtggaaagagtcaaatggctctcctcaagcgtattcaacaaggggctgaaggatgcccagaaggtaccccattgtatgggatctgatctggggcctcggtgcacatgctttacatgtgtttagtcgaggttaaaaaaacgtctaggccccccgaaccacggggacgtggttttcctttgaaaaacacgatgataatatggccacaaccatggacaaagtgctgaatagggaggaaagtctgcaactgatggatctgttgggacttgagaggtctgcatggggtaatatcccacttatgaggaaagcatacctgaagaagtgtaaagagttccatcctgacaaaggtggagatgaagagaagatgaaaaagatgaacacactgtataagaaaatggaagatggtgtaaagtatgctcaccagccagattttggaggtttttgggatgccacagagatacctacttatggtacagatgagtgggaacagtggtggaatgcatttaatgaagagaatccctttgcctctctgttaatgcctagttctgatgatgaggccacagctgactcccagcacagtactccacccaagaaaaagagaaaagtggaagacccaaaggatttcccctctgaactcttgtccttcttgtctcatgcagtgttctcaaataggaccctggcttgctttgctatctacactactaaggagaaggcagctctcttgtacaagaaaatcatggaaaagtattctgtcacctttatttccaggcacaactcctataatcataatattctctttttcttgacaccccataggcatagggtgagtgcaattaacaactatgctcagaagttgtgtactttctccttcctgatctgtaagggtgtgaataaggagtatctcatgtattcagccctgaccagagacccctttagtgtgattgaagaatccctgcctggtgggctcaaggagcatgatttcaacccagaagaggctgaagaaacaaaacaggtgagctggaagcttgtgactgaatatgcaatggagacaaagtgtgatgatgtcctgctcctcctgggaatgtacctggaatttcagtatagctttgaaatgtgtctgaaatgtatcaaaaaggaacagccttctcattataagtatcatgaaaagcactatgccaatgcagctatatttgcagattctaaaaaccagaaaaccatttgtcagcaagctgttgacacagttctggccaagaaaagagtagactctctccagcttaccagggagcagatgttgacaaataggttcaatgaccttctggacagaatggacataatgtttggctcaactggatctgcagatatagaggagtggatggctggagtggcctggctgcactgtctcctccctaaaatggacagtgtagtctatgacttccttaagtgtatggtctataatatccctaaaaagagatactggttgttcaagggacccattgattcagggaaaactacccttgctgctgcacttctggaactctgtggtgggaaagctctcaatgtcaacctgccacttgatagactcaactttgagctgggggtggcaattgatcagtttttggtagtgtttgaagatgtgaaaggtacaggaggagagtccagggatttgcctagtggccaaggcatcaacaatctggacaacctcagagactacctggatgggtctgtaaaggtcaaccttgaaaaaaagcatctcaacaagaggactcaaatatttccacctggaatagtcactatgaatgaatattcagtgcccaagaccctccaggctagatttgtcaagcaaattgatttcagacctaaagattatctgaaacattgtttggagaggagtgagttcctccttgagaaaaggattattcagtcaggaatagcactgcttcttatgctgatatggtatagaccagtggctgagtttgcccaaagcattcagagtagaatagttgagtggaaagaaaggcttgacaaggagttttctctttcagtatatcaaaagatgaagttcaatgtggctatgggtattggagtgcttgattggttgagaaacagtgatgatgatgatgaagattctcaggaaaatgctgataaaaatgaggatgggggagagaagaatatggaagattctggtcatgaaactggcattgatagtcagagccaggggagtttccaggctccacagagctcccaaagtgtccatgaccacaaccagccttaccatatatgcagaggttttacttgtttcaagaaacctcccactccccctccagaacctgaaacatgagcggccgcgactctagatcataatcagccataccacacctccccctgaacctgaaaaatcaatgcaattattgttgaaataaagcacccagcaatgcctgggaccatgtaaaactgtcctggttctttccaaggtatagagcatagcccacaggctgatatttctggccagggttggttggaggacagccttgtctataggaagagaatgaggtttttgcactataagggcatgcaagtcagtcccgcccctaactccacctggttgcccatcccgcccctaactccgcccagttccgcccattctccgccccatggctgactaattttttttatttatgcagaggcggaggccgcctcggcctctgagctattccagaagtagtgaggaggcttttttggaggcccttaattaaattgacatatctacctaatttgtgtataataaccctgataaatgcttcaataatattgaaaaaggaagagtcctgtataaaaagaaccagctgtggaatgtgtgtcagttagtaggcttatgcaaagtagcccgcccaagagacaggctgaggcccgcccaccatgatagaacaagatggacttcatgctggatctcctgcagcatgggtggaaagactttttggttatgattgggctcagcagaccattggatgttctgatgctgctgtgttcaggcttagtgcacagggtaggccagtgctctttgtgaagactgatctctctggagctttgaatgaactgcaggatgaggctgctaggctttcatggctggccaccacaggtgtcccttgtgctgcagtgttggatgtggttactgaggctgggagggattggctcctcctgggagaagtgccaggtcaggatctgttgagttctcacctggctccagctgaaaaagtctccataatggcagatgctatgagaaggctgcacacattggacccagctacatgcccatttgaccatcaggccaaacacaggattgagagggccagaacaagaatggaggctgggttggtggaccaggatgaccttgatgaggagcatcagggcctggctccagctgaattgtttgccaggctcaaggctagtatgcctgatggggaggatctggtggtaactcatggtgatgcctgtttgcctaacatcatggtggaaaatggaaggttctctggattcattgattgtggaagactgggtgtagctgacaggtatcaggacatagctcttgcaacaagggatattgcagaggagttgggtggagaatgggctgacaggttcctggtcttgtatggcattgctgccccagacagccaaagaattgctttctataggctgttggatgagtttttctaagctcagcacccacaaagctctcaggtcctaagagacactggcacccatatccatgcatcccttgtataaataaagcatccagcaaagctggtaccatgtaaaactgtcttggttgtttccaaggtatagagcatagctcaataggtttttgactttgtcccgcccctctaagtcctgcacacagatactccaatatgacatacagcatgcttgggaactgagtgcccccatgtgggcagagagcaccatgtgccacagtccctgagaagttcttgggaagggtgggcaattgccatgtgtgcctagagaaggttgtttgtaatactgccaagtgccatgtggtgtgatattggctccatgtgccttgtttgtaataacatttccatgtgtcttgggaagaaccatatataagcagagctggtttagtgaaccctcagataggcctagaccatggccagcagtgagaatgtcataacagagttcatgagattcaaggtgaggatggagggaactgtcaatggtcatgagtttgagattgaaggggaaggggagggcagaccctatgagggccacaacacagtcaaattgaaggtgaccaaagggggaccccttccctttgcctgggacatcctgagcccacagtttcagtatggttccaaagtttatgtaaagcaccctgctgacatccctgactacaagaaactgtccttcccagaaggattcaagtgggaaagggtcatgaactttgaggatggaggggttgcaacagtgacccaggacagttctctccaagatggctgtttcatctacaaggtaaaattcattggtgtgaactttccctctgatggcccagtgatgcaaaaaaagaccatgggctgggaagcctcaacagaaaggctgtaccctagagatggagttctcaagggtgagacccacaaagctctaaagctcaaagatgggggccactatctggtggagttcaagagcatctacatggcaaaaaagccagtgcagttgcctggctattactatgtggatgccaagcttgacataacctcacacaatgaagactacactattgtggaacagtatgagaggactgagggaagacatcatctgtttctgtgaattcgcactgcatggacttacctgcctggtggtatcagtcacaggctctgataaggattcagctgttgtataaataaagcatgcagcctagcaggaaccatgttaatctctcttggttgtttccttggaatactcctaagcacattaggtttttagatctgtagaaaagatcaaaggatcttcttgagatcctttttttctgcgcgtaatctgctgcttgcaaacaaaaaaaccaccgctaccagcggtggtttgtttgccggatcaagagctaccaactctttttccgaaggtaactggcttcagcagagcgcagataccaaatactgtccttctagtgtagccgtagttaggccaccacttcaagaactctgtagcaccgcctacatacctcgctctgctaatcctgttaccagtggctgctgccagtggcgataagtcgtgtcttaccgggttggactcaagacgatagttaccggataaggcgcagcggtcgggctgaacggggggttcgtgcacacagcccagcttggagcgaacgacctacaccgaactgagatacctacagcgtgagctatgagaaagcgccacgcttcccgaagggagaaaggcggacaggtatccggtaagcggcagggtcggaacaggagagcgcacgagggagcttccagggggaaacgcctggtatctttatagtcctgtcgggtttcgccacctctgacttgagcgtcgatttttgtgatgctcgtcaggggggcggagcctatggaaaaacgccagcaacgcggcctttttacgg

SEQ ID NO: 638 - DNA, 7343 bp, Artificial Sequence
  pCzGFP-I-T(E107L/E108L/S112N)-BB3
  CDS (1917)...(4040): Large T Antigen (E107L/E108L/S112N)
ttcctattaatagtaatcaattacggggtcattagttcatagcccatatatggagttccgcgttacataacttacggtaaatggcccgcctggctgaccgcccaacgacccccgcccattgacgtcaataatgacgtatgttcccatagtaacgccaatagggactttccattgacgtcaatgggtggagtatttacggtaaactgcccacttggcagtacatcaagtgtatcatatgccaagtacgccccctattgacgtcaatgacggtaaatggcccgcctggcattatgcccagtacatgaccttatgggactttcctacttggcagtacatctacgtattagtcatcgctattaccatggtgatgcggttttggcagtacatcaatgggcgtggatagcggtttgactcacggggatttccaagtctccaccccattgacgtcaatgggagtttgttttggcaccaaaatcaacgggactttccaaaatgtcgtaacaactccgccccattgacgcaaatgggcggtaggcgtgtacggtgggaggtctatataagcagagctggtttagtgaaccgtcagatccgctagctagaccatggtgagcaagggagaggaactctttacaggtgtggtcccaattctggtggagctggatggagatgtgaatgggcacaaattttctgtcagtggagagggagagggggatgctacctatggcaaactgactctgaagttcatctgcactactggcaagctgcctgtgccatggccaactctggtgacaaccctcacctatggagtccagtgcttttccagatatcctgaccacatgaaacagcatgactttttcaaatctgcaatgcctgagggctatgtgcaagagagaactatctttttcaaggatgatgggaactataagactagggctgaggtgaaatttgaaggagacaccctggtcaataggattgagctcaaggggattgacttcaaggaggatggcaacattctgggccataagctggagtataattacaattcccacaatgtctacattatggctgacaagcagaagaatggcattaaggtcaacttcaagattagacacaacatagaggatggatctgtgcagctggctgaccattaccagcagaatacacctattggggatgggccagtgctgctccctgacaatcactatctgagcacccaatctgctttgtctaaagatcctaatgaaaagagagatcacatggtgctgctggagtttgtaactgctgcaggaattaccttgggtatggatgaactctataagtaaggatccgcccctctccctcccccccccctaacgttactggccgaagccgcttggaataaggccggtgtgcgtttgtctatatgttattttccaccatattgccgtcttttggcaatgtgagggcccggaaacctggccctgtcttcttgacgagcattcctaggggtctttcccctctcgccaaaggaatgcaaggtctgttgaatgtcgtgaaggaagcagttcctctggaagcttcttgaagacaaacaacgtctgtagcgaccctttgcaggcagcggaaccccccacctggcgacaggtgcctctgcggccaaaagccacgtgtataagatacacctgcaaaggcggcacaaccccagtgccacgttgtgagttggatagttgtggaaagagtcaaatggctctcctcaagcgtattcaacaaggggctgaaggatgcccagaaggtaccccattgtatgggatctgatctggggcctcggtgcacatgctttacatgtgtttagtcgaggttaaaaaaacgtctaggccccccgaaccacggggacgtggttttcctttgaaaaacacgatgataatatggccacaaccatggacaaagtgctgaatagggaggaaagtctgcaactgatggatctgttgggacttgagaggtctgcatggggtaatatcccacttatgaggaaagcatacctgaagaagtgtaaagagttccatcctgacaaaggtggagatgaagagaagatgaaaaagatgaacacactgtataagaaaatggaagatggtgtaaagtatgctcaccagccagattttggaggtttttgggatgccacagagatacctacttatggtacagatgagtgggaacagtggtggaatgcatttaatctgttaaatttgttttgctctgaggaaatgcctagtaatgatgatgaggccacagctgactcccagcacagtactccacccaagaaaaagagaaaagtggaagacccaaaggatttcccctctgaactcttgtccttcttgtctcatgcagtgttctcaaataggaccctggcttgctttgctatctacactactaaggagaaggcagctctcttgtacaagaaaatcatggaaaagtattctgtcacctttatttccaggcacaactcctataatcataatattctctttttcttgacaccccataggcatagggtgagtgcaattaacaactatgctcagaagttgtgtactttctccttcctgatctgtaagggtgtgaataaggagtatctcatgtattcagccctgaccagagacccctttagtgtgattgaagaatccctgcctggtgggctcaaggagcatgatttcaacccagaagaggctgaagaaacaaaacaggtgagctggaagcttgtgactgaatatgcaatggagacaaagtgtgatgatgtcctgctcctcctgggaatgtacctggaatttcagtatagctttgaaatgtgtctgaaatgtatcaaaaaggaacagccttctcattataagtatcatgaaaagcactatgccaatgcagctatatttgcagattctaaaaaccagaaaaccatttgtcagcaagctgttgacacagttctggccaagaaaagagtagactctctccagcttaccagggagcagatgttgacaaataggttcaatgaccttctggacagaatggacataatgtttggctcaactggatctgcagatatagaggagtggatggctggagtggcctggctgcactgtctcctccctaaaatggacagtgtagtctatgacttccttaagtgtatggtctataatatccctaaaaagagatactggttgttcaagggacccattgattcagggaaaactacccttgctgctgcacttctggaactctgtggtgggaaagctctcaatgtcaacctgccacttgatagactcaactttgagctgggggtggcaattgatcagtttttggtagtgtttgaagatgtgaaaggtacaggaggagagtccagggatttgcctagtggccaaggcatcaacaatctggacaacctcagagactacctggatgggtctgtaaaggtcaaccttgaaaaaaagcatctcaacaagaggactcaaatatttccacctggaatagtcactatgaatgaatattcagtgcccaagaccctccaggctagatttgtcaagcaaattgatttcagacctaaagattatctgaaacattgtttggagaggagtgagttcctccttgagaaaaggattattcagtcaggaatagcactgcttcttatgctgatatggtatagaccagtggctgagtttgcccaaagcattcagagtagaatagttgagtggaaagaaaggcttgacaaggagttttctctttcagtatatcaaaagatgaagttcaatgtggctatgggtattggagtgcttgattggttgagaaacagtgatgatgatgatgaagattctcaggaaaatgctgataaaaatgaggatgggggagagaagaatatggaagattctggtcatgaaactggcattgatagtcagagccaggggagtttccaggctccacagagctcccaaagtgtccatgaccacaaccagccttaccatatatgcagaggttttacttgtttcaagaaacctcccactccccctccagaacctgaaacatgagcggccgcgactctagatcataatcagccataccacacctccccctgaacctgaaaaatcaatgcaattattgttgaaataaagcacccagcaatgcctgggaccatgtaaaactgtcctggttctttccaaggtatagagcatagcccacaggctgatatttctggccagggttggttggaggacagccttgtctataggaagagaatgaggtttttgcactataagggcatgcaagtcagtcccgcccctaactccacctggttgcccatcccgcccctaactccgcccagttccgcccattctccgccccatggctgactaattttttttatttatgcagaggcggaggccgcctcggcctctgagctattccagaagtagtgaggaggcttttttggaggcccttaattaaattgacatatctacctaatttgtgtataataaccctgataaatgcttcaataatattgaaaaaggaagagtcctgtataaaaagaaccagctgtggaatgtgtgtcagttagtaggcttatgcaaagtagcccgcccaagagacaggctgaggcccgcccaccatgatagaacaagatggacttcatgctggatctcctgcagcatgggtggaaagactttttggttatgattgggctcagcagaccattggatgttctgatgctgctgtgttcaggcttagtgcacagggtaggccagtgctctttgtgaagactgatctctctggagctttgaatgaactgcaggatgaggctgctaggctttcatggctggccaccacaggtgtcccttgtgctgcagtgttggatgtggttactgaggctgggagggattggctcctcctgggagaagtgccaggtcaggatctgttgagttctcacctggctccagctgaaaaagtctccataatggcagatgctatgagaaggctgcacacattggacccagctacatgcccatttgaccatcaggccaaacacaggattgagagggccagaacaagaatggaggctgggttggtggaccaggatgaccttgatgaggagcatcagggcctggctccagctgaattgtttgccaggctcaaggctagtatgcctgatggggaggatctggtggtaactcatggtgatgcctgtttgcctaacatcatggtggaaaatggaaggttctctggattcattgattgtggaagactgggtgtagctgacaggtatcaggacatagctcttgcaacaagggatattgcagaggagttgggtggagaatgggctgacaggttcctggtcttgtatggcattgctgccccagacagccaaagaattgctttctataggctgttggatgagtttttctaagctcagcacccacaaagctctcaggtcctaagagacactggcacccatatccatgcatcccttgtataaataaagcatccagcaaagctggtaccatgtaaaactgtcttggttgtttccaaggtatagagcatagctcaataggtttttgactttgtcccgcccctctaagtcctgcacacagatactccaatatgacatacagcatgcttgggaactgagtgcccccatgtgggcagagagcaccatgtgccacagtccctgagaagttcttgggaagggtgggcaattgccatgtgtgcctagagaaggttgtttgtaatactgccaagtgccatgtggtgtgatattggctccatgtgccttgtttgtaataacatttccatgtgtcttgggaagaaccatatataagcagagctggtttagtgaaccctcagataggcctagaccatggccagcagtgagaatgtcataacagagttcatgagattcaaggtgaggatggagggaactgtcaatggtcatgagtttgagattgaaggggaaggggagggcagaccctatgagggccacaacacagtcaaattgaaggtgaccaaagggggaccccttccctttgcctgggacatcctgagcccacagtttcagtatggttccaaagtttatgtaaagcaccctgctgacatccctgactacaagaaactgtccttcccagaaggattcaagtgggaaagggtcatgaactttgaggatggaggggttgcaacagtgacccaggacagttctctccaagatggctgtttcatctacaaggtaaaattcattggtgtgaactttccctctgatggcccagtgatgcaaaaaaagaccatgggctgggaagcctcaacagaaaggctgtaccctagagatggagttctcaagggtgagacccacaaagctctaaagctcaaagatgggggccactatctggtggagttcaagagcatctacatggcaaaaaagccagtgcagttgcctggctattactatgtggatgccaagcttgacataacctcacacaatgaagactacactattgtggaacagtatgagaggactgagggaagacatcatctgtttctgtgaattcgcactgcatggacttacctgcctggtggtatcagtcacaggctctgataaggattcagctgttgtataaataaagcatgcagcctagcaggaaccatgttaatctctcttggttgtttccttggaatactcctaagcacattaggtttttagatctgtagaaaagatcaaaggatcttcttgagatcctttttttctgcgcgtaatctgctgcttgcaaacaaaaaaaccaccgctaccagcggtggtttgtttgccggatcaagagctaccaactctttttccgaaggtaactggcttcagcagagcgcagataccaaatactgtccttctagtgtagccgtagttaggccaccacttcaagaactctgtagcaccgcctacatacctcgctctgctaatcctgttaccagtggctgctgccagtggcgataagtcgtgtcttaccgggttggactcaagacgatagttaccggataaggcgcagcggtcgggctgaacggggggttcgtgcacacagcccagcttggagcgaacgacctacaccgaactgagatacctacagcgtgagctatgagaaagcgccacgcttcccgaagggagaaaggcggacaggtatccggtaagcggcagggtcggaacaggagagcgcacgagggagcttccagggggaaacgcctggtatctttatagtcctgtcgggtttcgccacctctgacttgagcgtcgatttttgtgatgctcgtcaggggggcggagcctatggaaaaacgccagcaacgcggcctttttacgg

SEQ ID NO: 639 - DNA, 7343 bp, Artificial Sequence
  pCzGFP-I-T(C105A/E107L/E108L/S112N)-BB3
  CDS (1917)...(4040): Large T Antigen (C105A/E107L/E108L/S112N)
ttcctattaatagtaatcaattacggggtcattagttcatagcccatatatggagttccgcgttacataacttacggtaaatggcccgcctggctgaccgcccaacgacccccgcccattgacgtcaataatgacgtatgttcccatagtaacgccaatagggactttccattgacgtcaatgggtggagtatttacggtaaactgcccacttggcagtacatcaagtgtatcatatgccaagtacgccccctattgacgtcaatgacggtaaatggcccgcctggcattatgcccagtacatgaccttatgggactttcctacttggcagtacatctacgtattagtcatcgctattaccatggtgatgcggttttggcagtacatcaatgggcgtggatagcggtttgactcacggggatttccaagtctccaccccattgacgtcaatgggagtttgttttggcaccaaaatcaacgggactttccaaaatgtcgtaacaactccgccccattgacgcaaatgggcggtaggcgtgtacggtgggaggtctatataagcagagctggtttagtgaaccgtcagatccgctagctagaccatggtgagcaagggagaggaactctttacaggtgtggtcccaattctggtggagctggatggagatgtgaatgggcacaaattttctgtcagtggagagggagagggggatgctacctatggcaaactgactctgaagttcatctgcactactggcaagctgcctgtgccatggccaactctggtgacaaccctcacctatggagtccagtgcttttccagatatcctgaccacatgaaacagcatgactttttcaaatctgcaatgcctgagggctatgtgcaagagagaactatctttttcaaggatgatgggaactataagactagggctgaggtgaaatttgaaggagacaccctggtcaataggattgagctcaaggggattgacttcaaggaggatggcaacattctgggccataagctggagtataattacaattcccacaatgtctacattatggctgacaagcagaagaatggcattaaggtcaacttcaagattagacacaacatagaggatggatctgtgcagctggctgaccattaccagcagaatacacctattggggatgggccagtgctgctccctgacaatcactatctgagcacccaatctgctttgtctaaagatcctaatgaaaagagagatcacatggtgctgctggagtttgtaactgctgcaggaattaccttgggtatggatgaactctataagtaaggatccgcccctctccctcccccccccctaacgttactggccgaagccgcttggaataaggccggtgtgcgtttgtctatatgttattttccaccatattgccgtcttttggcaatgtgagggcccggaaacctggccctgtcttcttgacgagcattcctaggggtctttcccctctcgccaaaggaatgcaaggtctgttgaatgtcgtgaaggaagcagttcctctggaagcttcttgaagacaaacaacgtctgtagcgaccctttgcaggcagcggaaccccccacctggcgacaggtgcctctgcggccaaaagccacgtgtataagatacacctgcaaaggcggcacaaccccagtgccacgttgtgagttggatagttgtggaaagagtcaaatggctctcctcaagcgtattcaacaaggggctgaaggatgcccagaaggtaccccattgtatgggatctgatctggggcctcggtgcacatgctttacatgtgtttagtcgaggttaaaaaaacgtctaggccccccgaaccacggggacgtggttttcctttgaaaaacacgatgataatatggccacaaccatggacaaagtgctgaatagggaggaaagtctgcaactgatggatctgttgggacttgagaggtctgcatggggtaatatcccacttatgaggaaagcatacctgaagaagtgtaaagagttccatcctgacaaaggtggagatgaagagaagatgaaaaagatgaacacactgtataagaaaatggaagatggtgtaaagtatgctcaccagccagattttggaggtttttgggatgccacagagatacctacttatggtacagatgagtgggaacagtggtggaatgcatttaatgaagagaatttgtttgcctctctgttaatgcctagtaatgatgatgaggccacagctgactcccagcacagtactccacccaagaaaaagagaaaagtggaagacccaaaggatttcccctctgaactcttgtccttcttgtctcatgcagtgttctcaaataggaccctggcttgctttgctatctacactactaaggagaaggcagctctcttgtacaagaaaatcatggaaaagtattctgtcacctttatttccaggcacaactcctataatcataatattctctttttcttgacaccccataggcatagggtgagtgcaattaacaactatgctcagaagttgtgtactttctccttcctgatctgtaagggtgtgaataaggagtatctcatgtattcagccctgaccagagacccctttagtgtgattgaagaatccctgcctggtgggctcaaggagcatgatttcaacccagaagaggctgaagaaacaaaacaggtgagctggaagcttgtgactgaatatgcaatggagacaaagtgtgatgatgtcctgctcctcctgggaatgtacctggaatttcagtatagctttgaaatgtgtctgaaatgtatcaaaaaggaacagccttctcattataagtatcatgaaaagcactatgccaatgcagctatatttgcagattctaaaaaccagaaaaccatttgtcagcaagctgttgacacagttctggccaagaaaagagtagactctctccagcttaccagggagcagatgttgacaaataggttcaatgaccttctggacagaatggacataatgtttggctcaactggatctgcagatatagaggagtggatggctggagtggcctggctgcactgtctcctccctaaaatggacagtgtagtctatgacttccttaagtgtatggtctataatatccctaaaaagagatactggttgttcaagggacccattgattcagggaaaactacccttgctgctgcacttctggaactctgtggtgggaaagctctcaatgtcaacctgccacttgatagactcaactttgagctgggggtggcaattgatcagtttttggtagtgtttgaagatgtgaaaggtacaggaggagagtccagggatttgcctagtggccaaggcatcaacaatctggacaacctcagagactacctggatgggtctgtaaaggtcaaccttgaaaaaaagcatctcaacaagaggactcaaatatttccacctggaatagtcactatgaatgaatattcagtgcccaagaccctccaggctagatttgtcaagcaaattgatttcagacctaaagattatctgaaacattgtttggagaggagtgagttcctccttgagaaaaggattattcagtcaggaatagcactgcttcttatgctgatatggtatagaccagtggctgagtttgcccaaagcattcagagtagaatagttgagtggaaagaaaggcttgacaaggagttttctctttcagtatatcaaaagatgaagttcaatgtggctatgggtattggagtgcttgattggttgagaaacagtgatgatgatgatgaagattctcaggaaaatgctgataaaaatgaggatgggggagagaagaatatggaagattctggtcatgaaactggcattgatagtcagagccaggggagtttccaggctccacagagctcccaaagtgtccatgaccacaaccagccttaccatatatgcagaggttttacttgtttcaagaaacctcccactccccctccagaacctgaaacatgagcggccgcgactctagatcataatcagccataccacacctccccctgaacctgaaaaatcaatgcaattattgttgaaataaagcacccagcaatgcctgggaccatgtaaaactgtcctggttctttccaaggtatagagcatagcccacaggctgatatttctggccagggttggttggaggacagccttgtctataggaagagaatgaggtttttgcactataagggcatgcaagtcagtcccgcccctaactccacctggttgcccatcccgcccctaactccgcccagttccgcccattctccgccccatggctgactaattttttttatttatgcagaggcggaggccgcctcggcctctgagctattccagaagtagtgaggaggcttttttggaggcccttaattaaattgacatatctacctaatttgtgtataataaccctgataaatgcttcaataatattgaaaaaggaagagtcctgtataaaaagaaccagctgtggaatgtgtgtcagttagtaggcttatgcaaagtagcccgcccaagagacaggctgaggcccgcccaccatgatagaacaagatggacttcatgctggatctcctgcagcatgggtggaaagactttttggttatgattgggctcagcagaccattggatgttctgatgctgctgtgttcaggcttagtgcacagggtaggccagtgctctttgtgaagactgatctctctggagctttgaatgaactgcaggatgaggctgctaggctttcatggctggccaccacaggtgtcccttgtgctgcagtgttggatgtggttactgaggctgggagggattggctcctcctgggagaagtgccaggtcaggatctgttgagttctcacctggctccagctgaaaaagtctccataatggcagatgctatgagaaggctgcacacattggacccagctacatgcccatttgaccatcaggccaaacacaggattgagagggccagaacaagaatggaggctgggttggtggaccaggatgaccttgatgaggagcatcagggcctggctccagctgaattgtttgccaggctcaaggctagtatgcctgatggggaggatctggtggtaactcatggtgatgcctgtttgcctaacatcatggtggaaaatggaaggttctctggattcattgattgtggaagactgggtgtagctgacaggtatcaggacatagctcttgcaacaagggatattgcagaggagttgggtggagaatgggctgacaggttcctggtcttgtatggcattgctgccccagacagccaaagaattgctttctataggctgttggatgagtttttctaagctcagcacccacaaagctctcaggtcctaagagacactggcacccatatccatgcatcccttgtataaataaagcatccagcaaagctggtaccatgtaaaactgtcttggttgtttccaaggtatagagcatagctcaataggtttttgactttgtcccgcccctctaagtcctgcacacagatactccaatatgacatacagcatgcttgggaactgagtgcccccatgtgggcagagagcaccatgtgccacagtccctgagaagttcttgggaagggtgggcaattgccatgtgtgcctagagaaggttgtttgtaatactgccaagtgccatgtggtgtgatattggctccatgtgccttgtttgtaataacatttccatgtgtcttgggaagaaccatatataagcagagctggtttagtgaaccctcagataggcctagaccatggccagcagtgagaatgtcataacagagttcatgagattcaaggtgaggatggagggaactgtcaatggtcatgagtttgagattgaaggggaaggggagggcagaccctatgagggccacaacacagtcaaattgaaggtgaccaaagggggaccccttccctttgcctgggacatcctgagcccacagtttcagtatggttccaaagtttatgtaaagcaccctgctgacatccctgactacaagaaactgtccttcccagaaggattcaagtgggaaagggtcatgaactttgaggatggaggggttgcaacagtgacccaggacagttctctccaagatggctgtttcatctacaaggtaaaattcattggtgtgaactttccctctgatggcccagtgatgcaaaaaaagaccatgggctgggaagcctcaacagaaaggctgtaccctagagatggagttctcaagggtgagacccacaaagctctaaagctcaaagatgggggccactatctggtggagttcaagagcatctacatggcaaaaaagccagtgcagttgcctggctattactatgtggatgccaagcttgacataacctcacacaatgaagactacactattgtggaacagtatgagaggactgagggaagacatcatctgtttctgtgaattcgcactgcatggacttacctgcctggtggtatcagtcacaggctctgataaggattcagctgttgtataaataaagcatgcagcctagcaggaaccatgttaatctctcttggttgtttccttggaatactcctaagcacattaggtttttagatctgtagaaaagatcaaaggatcttcttgagatcctttttttctgcgcgtaatctgctgcttgcaaacaaaaaaaccaccgctaccagcggtggtttgtttgccggatcaagagctaccaactctttttccgaaggtaactggcttcagcagagcgcagataccaaatactgtccttctagtgtagccgtagttaggccaccacttcaagaactctgtagcaccgcctacatacctcgctctgctaatcctgttaccagtggctgctgccagtggcgataagtcgtgtcttaccgggttggactcaagacgatagttaccggataaggcgcagcggtcgggctgaacggggggttcgtgcacacagcccagcttggagcgaacgacctacaccgaactgagatacctacagcgtgagctatgagaaagcgccacgcttcccgaagggagaaaggcggacaggtatccggtaagcggcagggtcggaacaggagagcgcacgagggagcttccagggggaaacgcctggtatctttatagtcctgtcgggtttcgccacctctgacttgagcgtcgatttttgtgatgctcgtcaggggggcggagcctatggaaaaacgccagcaacgcggcctttttacgg

SEQ ID NO: 640 - DNA, 7343 bp, Artificial Sequence
  pCzGFP-I-T(C105A/E108L/S112N)-BB3
  CDS (1917)...(4040): Large T Antigen (C105A/E108L/S112N)
ttcctattaatagtaatcaattacggggtcattagttcatagcccatatatggagttccgcgttacataacttacggtaaatggcccgcctggctgaccgcccaacgacccccgcccattgacgtcaataatgacgtatgttcccatagtaacgccaatagggactttccattgacgtcaatgggtggagtatttacggtaaactgcccacttggcagtacatcaagtgtatcatatgccaagtacgccccctattgacgtcaatgacggtaaatggcccgcctggcattatgcccagtacatgaccttatgggactttcctacttggcagtacatctacgtattagtcatcgctattaccatggtgatgcggttttggcagtacatcaatgggcgtggatagcggtttgactcacggggatttccaagtctccaccccattgacgtcaatgggagtttgttttggcaccaaaatcaacgggactttccaaaatgtcgtaacaactccgccccattgacgcaaatgggcggtaggcgtgtacggtgggaggtctatataagcagagctggtttagtgaaccgtcagatccgctagctagaccatggtgagcaagggagaggaactctttacaggtgtggtcccaattctggtggagctggatggagatgtgaatgggcacaaattttctgtcagtggagagggagagggggatgctacctatggcaaactgactctgaagttcatctgcactactggcaagctgcctgtgccatggccaactctggtgacaaccctcacctatggagtccagtgcttttccagatatcctgaccacatgaaacagcatgactttttcaaatctgcaatgcctgagggctatgtgcaagagagaactatctttttcaaggatgatgggaactataagactagggctgaggtgaaatttgaaggagacaccctggtcaataggattgagctcaaggggattgacttcaaggaggatggcaacattctgggccataagctggagtataattacaattcccacaatgtctacattatggctgacaagcagaagaatggcattaaggtcaacttcaagattagacacaacatagaggatggatctgtgcagctggctgaccattaccagcagaatacacctattggggatgggccagtgctgctccctgacaatcactatctgagcacccaatctgctttgtctaaagatcctaatgaaaagagagatcacatggtgctgctggagtttgtaactgctgcaggaattaccttgggtatggatgaactctataagtaaggatccgcccctctccctcccccccccctaacgttactggccgaagccgcttggaataaggccggtgtgcgtttgtctatatgttattttccaccatattgccgtcttttggcaatgtgagggcccggaaacctggccctgtcttcttgacgagcattcctaggggtctttcccctctcgccaaaggaatgcaaggtctgttgaatgtcgtgaaggaagcagttcctctggaagcttcttgaagacaaacaacgtctgtagcgaccctttgcaggcagcggaaccccccacctggcgacaggtgcctctgcggccaaaagccacgtgtataagatacacctgcaaaggcggcacaaccccagtgccacgttgtgagttggatagttgtggaaagagtcaaatggctctcctcaagcgtattcaacaaggggctgaaggatgcccagaaggtaccccattgtatgggatctgatctggggcctcggtgcacatgctttacatgtgtttagtcgaggttaaaaaaacgtctaggccccccgaaccacggggacgtggttttcctttgaaaaacacgatgataatatggccacaaccatggacaaagtgctgaatagggaggaaagtctgcaactgatggatctgttgggacttgagaggtctgcatggggtaatatcccacttatgaggaaagcatacctgaagaagtgtaaagagttccatcctgacaaaggtggagatgaagagaagatgaaaaagatgaacacactgtataagaaaatggaagatggtgtaaagtatgctcaccagccagattttggaggtttttgggatgccacagagatacctacttatggtacagatgagtgggaacagtggtggaatgcatttaatgaagagaatttgtttgcctctgagttaatgcctagtaatgatgatgaggccacagctgactcccagcacagtactccacccaagaaaaagagaaaagtggaagacccaaaggatttcccctctgaactcttgtccttcttgtctcatgcagtgttctcaaataggaccctggcttgctttgctatctacactactaaggagaaggcagctctcttgtacaagaaaatcatggaaaagtattctgtcacctttatttccaggcacaactcctataatcataatattctctttttcttgacaccccataggcatagggtgagtgcaattaacaactatgctcagaagttgtgtactttctccttcctgatctgtaagggtgtgaataaggagtatctcatgtattcagccctgaccagagacccctttagtgtgattgaagaatccctgcctggtgggctcaaggagcatgatttcaacccagaagaggctgaagaaacaaaacaggtgagctggaagcttgtgactgaatatgcaatggagacaaagtgtgatgatgtcctgctcctcctgggaatgtacctggaatttcagtatagctttgaaatgtgtctgaaatgtatcaaaaaggaacagccttctcattataagtatcatgaaaagcactatgccaatgcagctatatttgcagattctaaaaaccagaaaaccatttgtcagcaagctgttgacacagttctggccaagaaaagagtagactctctccagcttaccagggagcagatgttgacaaataggttcaatgaccttctggacagaatggacataatgtttggctcaactggatctgcagatatagaggagtggatggctggagtggcctggctgcactgtctcctccctaaaatggacagtgtagtctatgacttccttaagtgtatggtctataatatccctaaaaagagatactggttgttcaagggacccattgattcagggaaaactacccttgctgctgcacttctggaactctgtggtgggaaagctctcaatgtcaacctgccacttgatagactcaactttgagctgggggtggcaattgatcagtttttggtagtgtttgaagatgtgaaaggtacaggaggagagtccagggatttgcctagtggccaaggcatcaacaatctggacaacctcagagactacctggatgggtctgtaaaggtcaaccttgaaaaaaagcatctcaacaagaggactcaaatatttccacctggaatagtcactatgaatgaatattcagtgcccaagaccctccaggctagatttgtcaagcaaattgatttcagacctaaagattatctgaaacattgtttggagaggagtgagttcctccttgagaaaaggattattcagtcaggaatagcactgcttcttatgctgatatggtatagaccagtggctgagtttgcccaaagcattcagagtagaatagttgagtggaaagaaaggcttgacaaggagttttctctttcagtatatcaaaagatgaagttcaatgtggctatgggtattggagtgcttgattggttgagaaacagtgatgatgatgatgaagattctcaggaaaatgctgataaaaatgaggatgggggagagaagaatatggaagattctggtcatgaaactggcattgatagtcagagccaggggagtttccaggctccacagagctcccaaagtgtccatgaccacaaccagccttaccatatatgcagaggttttacttgtttcaagaaacctcccactccccctccagaacctgaaacatgagcggccgcgactctagatcataatcagccataccacacctccccctgaacctgaaaaatcaatgcaattattgttgaaataaagcacccagcaatgcctgggaccatgtaaaactgtcctggttctttccaaggtatagagcatagcccacaggctgatatttctggccagggttggttggaggacagccttgtctataggaagagaatgaggtttttgcactataagggcatgcaagtcagtcccgcccctaactccacctggttgcccatcccgcccctaactccgcccagttccgcccattctccgccccatggctgactaattttttttatttatgcagaggcggaggccgcctcggcctctgagctattccagaagtagtgaggaggcttttttggaggcccttaattaaattgacatatctacctaatttgtgtataataaccctgataaatgcttcaataatattgaaaaaggaagagtcctgtataaaaagaaccagctgtggaatgtgtgtcagttagtaggcttatgcaaagtagcccgcccaagagacaggctgaggcccgcccaccatgatagaacaagatggacttcatgctggatctcctgcagcatgggtggaaagactttttggttatgattgggctcagcagaccattggatgttctgatgctgctgtgttcaggcttagtgcacagggtaggccagtgctctttgtgaagactgatctctctggagctttgaatgaactgcaggatgaggctgctaggctttcatggctggccaccacaggtgtcccttgtgctgcagtgttggatgtggttactgaggctgggagggattggctcctcctgggagaagtgccaggtcaggatctgttgagttctcacctggctccagctgaaaaagtctccataatggcagatgctatgagaaggctgcacacattggacccagctacatgcccatttgaccatcaggccaaacacaggattgagagggccagaacaagaatggaggctgggttggtggaccaggatgaccttgatgaggagcatcagggcctggctccagctgaattgtttgccaggctcaaggctagtatgcctgatggggaggatctggtggtaactcatggtgatgcctgtttgcctaacatcatggtggaaaatggaaggttctctggattcattgattgtggaagactgggtgtagctgacaggtatcaggacatagctcttgcaacaagggatattgcagaggagttgggtggagaatgggctgacaggttcctggtcttgtatggcattgctgccccagacagccaaagaattgctttctataggctgttggatgagtttttctaagctcagcacccacaaagctctcaggtcctaagagacactggcacccatatccatgcatcccttgtataaataaagcatccagcaaagctggtaccatgtaaaactgtcttggttgtttccaaggtatagagcatagctcaataggtttttgactttgtcccgcccctctaagtcctgcacacagatactccaatatgacatacagcatgcttgggaactgagtgcccccatgtgggcagagagcaccatgtgccacagtccctgagaagttcttgggaagggtgggcaattgccatgtgtgcctagagaaggttgtttgtaatactgccaagtgccatgtggtgtgatattggctccatgtgccttgtttgtaataacatttccatgtgtcttgggaagaaccatatataagcagagctggtttagtgaaccctcagataggcctagaccatggccagcagtgagaatgtcataacagagttcatgagattcaaggtgaggatggagggaactgtcaatggtcatgagtttgagattgaaggggaaggggagggcagaccctatgagggccacaacacagtcaaattgaaggtgaccaaagggggaccccttccctttgcctgggacatcctgagcccacagtttcagtatggttccaaagtttatgtaaagcaccctgctgacatccctgactacaagaaactgtccttcccagaaggattcaagtgggaaagggtcatgaactttgaggatggaggggttgcaacagtgacccaggacagttctctccaagatggctgtttcatctacaaggtaaaattcattggtgtgaactttccctctgatggcccagtgatgcaaaaaaagaccatgggctgggaagcctcaacagaaaggctgtaccctagagatggagttctcaagggtgagacccacaaagctctaaagctcaaagatgggggccactatctggtggagttcaagagcatctacatggcaaaaaagccagtgcagttgcctggctattactatgtggatgccaagcttgacataacctcacacaatgaagactacactattgtggaacagtatgagaggactgagggaagacatcatctgtttctgtgaattcgcactgcatggacttacctgcctggtggtatcagtcacaggctctgataaggattcagctgttgtataaataaagcatgcagcctagcaggaaccatgttaatctctcttggttgtttccttggaatactcctaagcacattaggtttttagatctgtagaaaagatcaaaggatcttcttgagatcctttttttctgcgcgtaatctgctgcttgcaaacaaaaaaaccaccgctaccagcggtggtttgtttgccggatcaagagctaccaactctttttccgaaggtaactggcttcagcagagcgcagataccaaatactgtccttctagtgtagccgtagttaggccaccacttcaagaactctgtagcaccgcctacatacctcgctctgctaatcctgttaccagtggctgctgccagtggcgataagtcgtgtcttaccgggttggactcaagacgatagttaccggataaggcgcagcggtcgggctgaacggggggttcgtgcacacagcccagcttggagcgaacgacctacaccgaactgagatacctacagcgtgagctatgagaaagcgccacgcttcccgaagggagaaaggcggacaggtatccggtaagcggcagggtcggaacaggagagcgcacgagggagcttccagggggaaacgcctggtatctttatagtcctgtcgggtttcgccacctctgacttgagcgtcgatttttgtgatgctcgtcaggggggcggagcctatggaaaaacgccagcaacgcggcctttttacgg

SEQ ID NO: 641 - DNA, 7343 bp, Artificial Sequence
  pCzGFP-I-T(C105A/E107L/S112N)-BB3
  CDS (1917)...(4040): Large T Antigen (C105A/E107L/S112N)
ttcctattaatagtaatcaattacggggtcattagttcatagcccatatatggagttccgcgttacataacttacggtaaatggcccgcctggctgaccgcccaacgacccccgcccattgacgtcaataatgacgtatgttcccatagtaacgccaatagggactttccattgacgtcaatgggtggagtatttacggtaaactgcccacttggcagtacatcaagtgtatcatatgccaagtacgccccctattgacgtcaatgacggtaaatggcccgcctggcattatgcccagtacatgaccttatgggactttcctacttggcagtacatctacgtattagtcatcgctattaccatggtgatgcggttttggcagtacatcaatgggcgtggatagcggtttgactcacggggatttccaagtctccaccccattgacgtcaatgggagtttgttttggcaccaaaatcaacgggactttccaaaatgtcgtaacaactccgccccattgacgcaaatgggcggtaggcgtgtacggtgggaggtctatataagcagagctggtttagtgaaccgtcagatccgctagctagaccatggtgagcaagggagaggaactctttacaggtgtggtcccaattctggtggagctggatggagatgtgaatgggcacaaattttctgtcagtggagagggagagggggatgctacctatggcaaactgactctgaagttcatctgcactactggcaagctgcctgtgccatggccaactctggtgacaaccctcacctatggagtccagtgcttttccagatatcctgaccacatgaaacagcatgactttttcaaatctgcaatgcctgagggctatgtgcaagagagaactatctttttcaaggatgatgggaactataagactagggctgaggtgaaatttgaaggagacaccctggtcaataggattgagctcaaggggattgacttcaaggaggatggcaacattctgggccataagctggagtataattacaattcccacaatgtctacattatggctgacaagcagaagaatggcattaaggtcaacttcaagattagacacaacatagaggatggatctgtgcagctggctgaccattaccagcagaatacacctattggggatgggccagtgctgctccctgacaatcactatctgagcacccaatctgctttgtctaaagatcctaatgaaaagagagatcacatggtgctgctggagtttgtaactgctgcaggaattaccttgggtatggatgaactctataagtaaggatccgcccctctccctcccccccccctaacgttactggccgaagccgcttggaataaggccggtgtgcgtttgtctatatgttattttccaccatattgccgtcttttggcaatgtgagggcccggaaacctggccctgtcttcttgacgagcattcctaggggtctttcccctctcgccaaaggaatgcaaggtctgttgaatgtcgtgaaggaagcagttcctctggaagcttcttgaagacaaacaacgtctgtagcgaccctttgcaggcagcggaaccccccacctggcgacaggtgcctctgcggccaaaagccacgtgtataagatacacctgcaaaggcggcacaaccccagtgccacgttgtgagttggatagttgtggaaagagtcaaatggctctcctcaagcgtattcaacaaggggctgaaggatgcccagaaggtaccccattgtatgggatctgatctggggcctcggtgcacatgctttacatgtgtttagtcgaggttaaaaaaacgtctaggccccccgaaccacggggacgtggttttcctttgaaaaacacgatgataatatggccacaaccatggacaaagtgctgaatagggaggaaagtctgcaactgatggatctgttgggacttgagaggtctgcatggggtaatatcccacttatgaggaaagcatacctgaagaagtgtaaagagttccatcctgacaaaggtggagatgaagagaagatgaaaaagatgaacacactgtataagaaaatggaagatggtgtaaagtatgctcaccagccagattttggaggtttttgggatgccacagagatacctacttatggtacagatgagtgggaacagtggtggaatgcatttaatgaagagaatttgtttgcctctctggaaatgcctagtaatgatgatgaggccacagctgactcccagcacagtactccacccaagaaaaagagaaaagtggaagacccaaaggatttcccctctgaactcttgtccttcttgtctcatgcagtgttctcaaataggaccctggcttgctttgctatctacactactaaggagaaggcagctctcttgtacaagaaaatcatggaaaagtattctgtcacctttatttccaggcacaactcctataatcataatattctctttttcttgacaccccataggcatagggtgagtgcaattaacaactatgctcagaagttgtgtactttctccttcctgatctgtaagggtgtgaataaggagtatctcatgtattcagccctgaccagagacccctttagtgtgattgaagaatccctgcctggtgggctcaaggagcatgatttcaacccagaagaggctgaagaaacaaaacaggtgagctggaagcttgtgactgaatatgcaatggagacaaagtgtgatgatgtcctgctcctcctgggaatgtacctggaatttcagtatagctttgaaatgtgtctgaaatgtatcaaaaaggaacagccttctcattataagtatcatgaaaagcactatgccaatgcagctatatttgcagattctaaaaaccagaaaaccatttgtcagcaagctgttgacacagttctggccaagaaaagagtagactctctccagcttaccagggagcagatgttgacaaataggttcaatgaccttctggacagaatggacataatgtttggctcaactggatctgcagatatagaggagtggatggctggagtggcctggctgcactgtctcctccctaaaatggacagtgtagtctatgacttccttaagtgtatggtctataatatccctaaaaagagatactggttgttcaagggacccattgattcagggaaaactacccttgctgctgcacttctggaactctgtggtgggaaagctctcaatgtcaacctgccacttgatagactcaactttgagctgggggtggcaattgatcagtttttggtagtgtttgaagatgtgaaaggtacaggaggagagtccagggatttgcctagtggccaaggcatcaacaatctggacaacctcagagactacctggatgggtctgtaaaggtcaaccttgaaaaaaagcatctcaacaagaggactcaaatatttccacctggaatagtcactatgaatgaatattcagtgcccaagaccctccaggctagatttgtcaagcaaattgatttcagacctaaagattatctgaaacattgtttggagaggagtgagttcctccttgagaaaaggattattcagtcaggaatagcactgcttcttatgctgatatggtatagaccagtggctgagtttgcccaaagcattcagagtagaatagttgagtggaaagaaaggcttgacaaggagttttctctttcagtatatcaaaagatgaagttcaatgtggctatgggtattggagtgcttgattggttgagaaacagtgatgatgatgatgaagattctcaggaaaatgctgataaaaatgaggatgggggagagaagaatatggaagattctggtcatgaaactggcattgatagtcagagccaggggagtttccaggctccacagagctcccaaagtgtccatgaccacaaccagccttaccatatatgcagaggttttacttgtttcaagaaacctcccactccccctccagaacctgaaacatgagcggccgcgactctagatcataatcagccataccacacctccccctgaacctgaaaaatcaatgcaattattgttgaaataaagcacccagcaatgcctgggaccatgtaaaactgtcctggttctttccaaggtatagagcatagcccacaggctgatatttctggccagggttggttggaggacagccttgtctataggaagagaatgaggtttttgcactataagggcatgcaagtcagtcccgcccctaactccacctggttgcccatcccgcccctaactccgcccagttccgcccattctccgccccatggctgactaattttttttatttatgcagaggcggaggccgcctcggcctctgagctattccagaagtagtgaggaggcttttttggaggcccttaattaaattgacatatctacctaatttgtgtataataaccctgataaatgcttcaataatattgaaaaaggaagagtcctgtataaaaagaaccagctgtggaatgtgtgtcagttagtaggcttatgcaaagtagcccgcccaagagacaggctgaggcccgcccaccatgatagaacaagatggacttcatgctggatctcctgcagcatgggtggaaagactttttggttatgattgggctcagcagaccattggatgttctgatgctgctgtgttcaggcttagtgcacagggtaggccagtgctctttgtgaagactgatctctctggagctttgaatgaactgcaggatgaggctgctaggctttcatggctggccaccacaggtgtcccttgtgctgcagtgttggatgtggttactgaggctgggagggattggctcctcctgggagaagtgccaggtcaggatctgttgagttctcacctggctccagctgaaaaagtctccataatggcagatgctatgagaaggctgcacacattggacccagctacatgcccatttgaccatcaggccaaacacaggattgagagggccagaacaagaatggaggctgggttggtggaccaggatgaccttgatgaggagcatcagggcctggctccagctgaattgtttgccaggctcaaggctagtatgcctgatggggaggatctggtggtaactcatggtgatgcctgtttgcctaacatcatggtggaaaatggaaggttctctggattcattgattgtggaagactgggtgtagctgacaggtatcaggacatagctcttgcaacaagggatattgcagaggagttgggtggagaatgggctgacaggttcctggtcttgtatggcattgctgccccagacagccaaagaattgctttctataggctgttggatgagtttttctaagctcagcacccacaaagctctcaggtcctaagagacactggcacccatatccatgcatcccttgtataaataaagcatccagcaaagctggtaccatgtaaaactgtcttggttgtttccaaggtatagagcatagctcaataggtttttgactttgtcccgcccctctaagtcctgcacacagatactccaatatgacatacagcatgcttgggaactgagtgcccccatgtgggcagagagcaccatgtgccacagtccctgagaagttcttgggaagggtgggcaattgccatgtgtgcctagagaaggttgtttgtaatactgccaagtgccatgtggtgtgatattggctccatgtgccttgtttgtaataacatttccatgtgtcttgggaagaaccatatataagcagagctggtttagtgaaccctcagataggcctagaccatggccagcagtgagaatgtcataacagagttcatgagattcaaggtgaggatggagggaactgtcaatggtcatgagtttgagattgaaggggaaggggagggcagaccctatgagggccacaacacagtcaaattgaaggtgaccaaagggggaccccttccctttgcctgggacatcctgagcccacagtttcagtatggttccaaagtttatgtaaagcaccctgctgacatccctgactacaagaaactgtccttcccagaaggattcaagtgggaaagggtcatgaactttgaggatggaggggttgcaacagtgacccaggacagttctctccaagatggctgtttcatctacaaggtaaaattcattggtgtgaactttccctctgatggcccagtgatgcaaaaaaagaccatgggctgggaagcctcaacagaaaggctgtaccctagagatggagttctcaagggtgagacccacaaagctctaaagctcaaagatgggggccactatctggtggagttcaagagcatctacatggcaaaaaagccagtgcagttgcctggctattactatgtggatgccaagcttgacataacctcacacaatgaagactacactattgtggaacagtatgagaggactgagggaagacatcatctgtttctgtgaattcgcactgcatggacttacctgcctggtggtatcagtcacaggctctgataaggattcagctgttgtataaataaagcatgcagcctagcaggaaccatgttaatctctcttggttgtttccttggaatactcctaagcacattaggtttttagatctgtagaaaagatcaaaggatcttcttgagatcctttttttctgcgcgtaatctgctgcttgcaaacaaaaaaaccaccgctaccagcggtggtttgtttgccggatcaagagctaccaactctttttccgaaggtaactggcttcagcagagcgcagataccaaatactgtccttctagtgtagccgtagttaggccaccacttcaagaactctgtagcaccgcctacatacctcgctctgctaatcctgttaccagtggctgctgccagtggcgataagtcgtgtcttaccgggttggactcaagacgatagttaccggataaggcgcagcggtcgggctgaacggggggttcgtgcacacagcccagcttggagcgaacgacctacaccgaactgagatacctacagcgtgagctatgagaaagcgccacgcttcccgaagggagaaaggcggacaggtatccggtaagcggcagggtcggaacaggagagcgcacgagggagcttccagggggaaacgcctggtatctttatagtcctgtcgggtttcgccacctctgacttgagcgtcgatttttgtgatgctcgtcaggggggcggagcctatggaaaaacgccagcaacgcggcctttttacgg

SEQ ID NO: 642 - DNA, 7343 bp, Artificial Sequence
  pCzGFP-I-T(C105A/S112N)-BB3
  CDS (1917)...(4040): Large T Antigen (C105A/S112N)
ttcctattaatagtaatcaattacggggtcattagttcatagcccatatatggagttccgcgttacataacttacggtaaatggcccgcctggctgaccgcccaacgacccccgcccattgacgtcaataatgacgtatgttcccatagtaacgccaatagggactttccattgacgtcaatgggtggagtatttacggtaaactgcccacttggcagtacatcaagtgtatcatatgccaagtacgccccctattgacgtcaatgacggtaaatggcccgcctggcattatgcccagtacatgaccttatgggactttcctacttggcagtacatctacgtattagtcatcgctattaccatggtgatgcggttttggcagtacatcaatgggcgtggatagcggtttgactcacggggatttccaagtctccaccccattgacgtcaatgggagtttgttttggcaccaaaatcaacgggactttccaaaatgtcgtaacaactccgccccattgacgcaaatgggcggtaggcgtgtacggtgggaggtctatataagcagagctggtttagtgaaccgtcagatccgctagctagaccatggtgagcaagggagaggaactctttacaggtgtggtcccaattctggtggagctggatggagatgtgaatgggcacaaattttctgtcagtggagagggagagggggatgctacctatggcaaactgactctgaagttcatctgcactactggcaagctgcctgtgccatggccaactctggtgacaaccctcacctatggagtccagtgcttttccagatatcctgaccacatgaaacagcatgactttttcaaatctgcaatgcctgagggctatgtgcaagagagaactatctttttcaaggatgatgggaactataagactagggctgaggtgaaatttgaaggagacaccctggtcaataggattgagctcaaggggattgacttcaaggaggatggcaacattctgggccataagctggagtataattacaattcccacaatgtctacattatggctgacaagcagaagaatggcattaaggtcaacttcaagattagacacaacatagaggatggatctgtgcagctggctgaccattaccagcagaatacacctattggggatgggccagtgctgctccctgacaatcactatctgagcacccaatctgctttgtctaaagatcctaatgaaaagagagatcacatggtgctgctggagtttgtaactgctgcaggaattaccttgggtatggatgaactctataagtaaggatccgcccctctccctcccccccccctaacgttactggccgaagccgcttggaataaggccggtgtgcgtttgtctatatgttattttccaccatattgccgtcttttggcaatgtgagggcccggaaacctggccctgtcttcttgacgagcattcctaggggtctttcccctctcgccaaaggaatgcaaggtctgttgaatgtcgtgaaggaagcagttcctctggaagcttcttgaagacaaacaacgtctgtagcgaccctttgcaggcagcggaaccccccacctggcgacaggtgcctctgcggccaaaagccacgtgtataagatacacctgcaaaggcggcacaaccccagtgccacgttgtgagttggatagttgtggaaagagtcaaatggctctcctcaagcgtattcaacaaggggctgaaggatgcccagaaggtaccccattgtatgggatctgatctggggcctcggtgcacatgctttacatgtgtttagtcgaggttaaaaaaacgtctaggccccccgaaccacggggacgtggttttcctttgaaaaacacgatgataatatggccacaaccatggacaaagtgctgaatagggaggaaagtctgcaactgatggatctgttgggacttgagaggtctgcatggggtaatatcccacttatgaggaaagcatacctgaagaagtgtaaagagttccatcctgacaaaggtggagatgaagagaagatgaaaaagatgaacacactgtataagaaaatggaagatggtgtaaagtatgctcaccagccagattttggaggtttttgggatgccacagagatacctacttatggtacagatgagtgggaacagtggtggaatgcatttaatgaagagaatttgtttgcctctgaggaaatgcctagtaatgatgatgaggccacagctgactcccagcacagtactccacccaagaaaaagagaaaagtggaagacccaaaggatttcccctctgaactcttgtccttcttgtctcatgcagtgttctcaaataggaccctggcttgctttgctatctacactactaaggagaaggcagctctcttgtacaagaaaatcatggaaaagtattctgtcacctttatttccaggcacaactcctataatcataatattctctttttcttgacaccccataggcatagggtgagtgcaattaacaactatgctcagaagttgtgtactttctccttcctgatctgtaagggtgtgaataaggagtatctcatgtattcagccctgaccagagacccctttagtgtgattgaagaatccctgcctggtgggctcaaggagcatgatttcaacccagaagaggctgaagaaacaaaacaggtgagctggaagcttgtgactgaatatgcaatggagacaaagtgtgatgatgtcctgctcctcctgggaatgtacctggaatttcagtatagctttgaaatgtgtctgaaatgtatcaaaaaggaacagccttctcattataagtatcatgaaaagcactatgccaatgcagctatatttgcagattctaaaaaccagaaaaccatttgtcagcaagctgttgacacagttctggccaagaaaagagtagactctctccagcttaccagggagcagatgttgacaaataggttcaatgaccttctggacagaatggacataatgtttggctcaactggatctgcagatatagaggagtggatggctggagtggcctggctgcactgtctcctccctaaaatggacagtgtagtctatgacttccttaagtgtatggtctataatatccctaaaaagagatactggttgttcaagggacccattgattcagggaaaactacccttgctgctgcacttctggaactctgtggtgggaaagctctcaatgtcaacctgccacttgatagactcaactttgagctgggggtggcaattgatcagtttttggtagtgtttgaagatgtgaaaggtacaggaggagagtccagggatttgcctagtggccaaggcatcaacaatctggacaacctcagagactacctggatgggtctgtaaaggtcaaccttgaaaaaaagcatctcaacaagaggactcaaatatttccacctggaatagtcactatgaatgaatattcagtgcccaagaccctccaggctagatttgtcaagcaaattgatttcagacctaaagattatctgaaacattgtttggagaggagtgagttcctccttgagaaaaggattattcagtcaggaatagcactgcttcttatgctgatatggtatagaccagtggctgagtttgcccaaagcattcagagtagaatagttgagtggaaagaaaggcttgacaaggagttttctctttcagtatatcaaaagatgaagttcaatgtggctatgggtattggagtgcttgattggttgagaaacagtgatgatgatgatgaagattctcaggaaaatgctgataaaaatgaggatgggggagagaagaatatggaagattctggtcatgaaactggcattgatagtcagagccaggggagtttccaggctccacagagctcccaaagtgtccatgaccacaaccagccttaccatatatgcagaggttttacttgtttcaagaaacctcccactccccctccagaacctgaaacatgagcggccgcgactctagatcataatcagccataccacacctccccctgaacctgaaaaatcaatgcaattattgttgaaataaagcacccagcaatgcctgggaccatgtaaaactgtcctggttctttccaaggtatagagcatagcccacaggctgatatttctggccagggttggttggaggacagccttgtctataggaagagaatgaggtttttgcactataagggcatgcaagtcagtcccgcccctaactccacctggttgcccatcccgcccctaactccgcccagttccgcccattctccgccccatggctgactaattttttttatttatgcagaggcggaggccgcctcggcctctgagctattccagaagtagtgaggaggcttttttggaggcccttaattaaattgacatatctacctaatttgtgtataataaccctgataaatgcttcaataatattgaaaaaggaagagtcctgtataaaaagaaccagctgtggaatgtgtgtcagttagtaggcttatgcaaagtagcccgcccaagagacaggctgaggcccgcccaccatgatagaacaagatggacttcatgctggatctcctgcagcatgggtggaaagactttttggttatgattgggctcagcagaccattggatgttctgatgctgctgtgttcaggcttagtgcacagggtaggccagtgctctttgtgaagactgatctctctggagctttgaatgaactgcaggatgaggctgctaggctttcatggctggccaccacaggtgtcccttgtgctgcagtgttggatgtggttactgaggctgggagggattggctcctcctgggagaagtgccaggtcaggatctgttgagttctcacctggctccagctgaaaaagtctccataatggcagatgctatgagaaggctgcacacattggacccagctacatgcccatttgaccatcaggccaaacacaggattgagagggccagaacaagaatggaggctgggttggtggaccaggatgaccttgatgaggagcatcagggcctggctccagctgaattgtttgccaggctcaaggctagtatgcctgatggggaggatctggtggtaactcatggtgatgcctgtttgcctaacatcatggtggaaaatggaaggttctctggattcattgattgtggaagactgggtgtagctgacaggtatcaggacatagctcttgcaacaagggatattgcagaggagttgggtggagaatgggctgacaggttcctggtcttgtatggcattgctgccccagacagccaaagaattgctttctataggctgttggatgagtttttctaagctcagcacccacaaagctctcaggtcctaagagacactggcacccatatccatgcatcccttgtataaataaagcatccagcaaagctggtaccatgtaaaactgtcttggttgtttccaaggtatagagcatagctcaataggtttttgactttgtcccgcccctctaagtcctgcacacagatactccaatatgacatacagcatgcttgggaactgagtgcccccatgtgggcagagagcaccatgtgccacagtccctgagaagttcttgggaagggtgggcaattgccatgtgtgcctagagaaggttgtttgtaatactgccaagtgccatgtggtgtgatattggctccatgtgccttgtttgtaataacatttccatgtgtcttgggaagaaccatatataagcagagctggtttagtgaaccctcagataggcctagaccatggccagcagtgagaatgtcataacagagttcatgagattcaaggtgaggatggagggaactgtcaatggtcatgagtttgagattgaaggggaaggggagggcagaccctatgagggccacaacacagtcaaattgaaggtgaccaaagggggaccccttccctttgcctgggacatcctgagcccacagtttcagtatggttccaaagtttatgtaaagcaccctgctgacatccctgactacaagaaactgtccttcccagaaggattcaagtgggaaagggtcatgaactttgaggatggaggggttgcaacagtgacccaggacagttctctccaagatggctgtttcatctacaaggtaaaattcattggtgtgaactttccctctgatggcccagtgatgcaaaaaaagaccatgggctgggaagcctcaacagaaaggctgtaccctagagatggagttctcaagggtgagacccacaaagctctaaagctcaaagatgggggccactatctggtggagttcaagagcatctacatggcaaaaaagccagtgcagttgcctggctattactatgtggatgccaagcttgacataacctcacacaatgaagactacactattgtggaacagtatgagaggactgagggaagacatcatctgtttctgtgaattcgcactgcatggacttacctgcctggtggtatcagtcacaggctctgataaggattcagctgttgtataaataaagcatgcagcctagcaggaaccatgttaatctctcttggttgtttccttggaatactcctaagcacattaggtttttagatctgtagaaaagatcaaaggatcttcttgagatcctttttttctgcgcgtaatctgctgcttgcaaacaaaaaaaccaccgctaccagcggtggtttgtttgccggatcaagagctaccaactctttttccgaaggtaactggcttcagcagagcgcagataccaaatactgtccttctagtgtagccgtagttaggccaccacttcaagaactctgtagcaccgcctacatacctcgctctgctaatcctgttaccagtggctgctgccagtggcgataagtcgtgtcttaccgggttggactcaagacgatagttaccggataaggcgcagcggtcgggctgaacggggggttcgtgcacacagcccagcttggagcgaacgacctacaccgaactgagatacctacagcgtgagctatgagaaagcgccacgcttcccgaagggagaaaggcggacaggtatccggtaagcggcagggtcggaacaggagagcgcacgagggagcttccagggggaaacgcctggtatctttatagtcctgtcgggtttcgccacctctgacttgagcgtcgatttttgtgatgctcgtcaggggggcggagcctatggaaaaacgccagcaacgcggcctttttacgg

SEQ ID NO: 643 - DNA, 7343 bp, Artificial Sequence; identical to SEQ ID NO: 630
  pCzGFP-I-T(L103P/E107K)-BB3
  CDS (1917)...(4040): Large T Antigen (L103P/E107K)

SEQ ID NO: 644 - DNA, 7343 bp, Artificial Sequence; identical to SEQ ID NO: 632
  pCzGFP-I-T(C105A/E107K)-BB3
  CDS (1917)...(4040): Large T Antigen (C105A/E107K)

SEQ ID NO: 645 - DNA, 7328 bp, Artificial Sequence
  pCzGFP-I-T(delta 366-370)-BB3
  CDS (1917)...(4025): Large T Antigen (delta 366-370)
ttcctattaatagtaatcaattacggggtcattagttcatagcccatatatggagttccgcgttacataacttacggtaaatggcccgcctggctgaccgcccaacgacccccgcccattgacgtcaataatgacgtatgttcccatagtaacgccaatagggactttccattgacgtcaatgggtggagtatttacggtaaactgcccacttggcagtacatcaagtgtatcatatgccaagtacgccccctattgacgtcaatgacggtaaatggcccgcctggcattatgcccagtacatgaccttatgggactttcctacttggcagtacatctacgtattagtcatcgctattaccatggtgatgcggttttggcagtacatcaatgggcgtggatagcggtttgactcacggggatttccaagtctccaccccattgacgtcaatgggagtttgttttggcaccaaaatcaacgggactttccaaaatgtcgtaacaactccgccccattgacgcaaatgggcggtaggcgtgtacggtgggaggtctatataagcagagctggtttagtgaaccgtcagatccgctagctagaccatggtgagcaagggagaggaactctttacaggtgtggtcccaattctggtggagctggatggagatgtgaatgggcacaaattttctgtcagtggagagggagagggggatgctacctatggcaaactgactctgaagttcatctgcactactggcaagctgcctgtgccatggccaactctggtgacaaccctcacctatggagtccagtgcttttccagatatcctgaccacatgaaacagcatgactttttcaaatctgcaatgcctgagggctatgtgcaagagagaactatctttttcaaggatgatgggaactataagactagggctgaggtgaaatttgaaggagacaccctggtcaataggattgagctcaaggggattgacttcaaggaggatggcaacattctgggccataagctggagtataattacaattcccacaatgtctacattatggctgacaagcagaagaatggcattaaggtcaacttcaagattagacacaacatagaggatggatctgtgcagctggctgaccattaccagcagaatacacctattggggatgggccagtgctgctccctgacaatcactatctgagcacccaatctgctttgtctaaagatcctaatgaaaagagagatcacatggtgctgctggagtttgtaactgctgcaggaattaccttgggtatggatgaactctataagtaaggatccgcccctctccctcccccccccctaacgttactggccgaagccgcttggaataaggccggtgtgcgtttgtctatatgttattttccaccatattgccgtcttttggcaatgtgagggcccggaaacctggccctgtcttcttgacgagcattcctaggggtctttcccctctcgccaaaggaatgcaaggtctgttgaatgtcgtgaaggaagcagttcctctggaagcttcttgaagacaaacaacgtctgtagcgaccctttgcaggcagcggaaccccccacctggcgacaggtgcctctgcggccaaaagccacgtgtataagatacacctgcaaaggcggcacaaccccagtgccacgttgtgagttggatagttgtggaaagagtcaaatggctctcctcaagcgtattcaacaaggggctgaaggatgcccagaaggtaccccattgtatgggatctgatctggggcctcggtgcacatgctttacatgtgtttagtcgaggttaaaaaaacgtctaggccccccgaaccacggggacgtggttttcctttgaaaaacacgatgataatatggccacaaccatggacaaagtgctgaatagggaggaaagtctgcaactgatggatctgttgggacttgagaggtctgcatggggtaatatcccacttatgaggaaagcatacctgaagaagtgtaaagagttccatcctgacaaaggtggagatgaagagaagatgaaaaagatgaacacactgtataagaaaatggaagatggtgtaaagtatgctcaccagccagattttggaggtttttgggatgccacagagatacctacttatggtacagatgagtgggaacagtggtggaatgcatttaatgaagagaatttgttttgctctgaggaaatgcctagttctgatgatgaggccacagctgactcccagcacagtactccacccaagaaaaagagaaaagtggaagacccaaaggatttcccctctgaactcttgtccttcttgtctcatgcagtgttctcaaataggaccctggcttgctttgctatctacactactaaggagaaggcagctctcttgtacaagaaaatcatggaaaagtattctgtcacctttatttccaggcacaactcctataatcataatattctctttttcttgacaccccataggcatagggtgagtgcaattaacaactatgctcagaagttgtgtactttctccttcctgatctgtaagggtgtgaataaggagtatctcatgtattcagccctgaccagagacccctttagtgtgattgaagaatccctgcctggtgggctcaaggagcatgatttcaacccagaagaggctgaagaaacaaaacaggtgagctggaagcttgtgactgaatatgcaatggagacaaagtgtgatgatgtcctgctcctcctgggaatgtacctggaatttcagtatagctttgaaatgtgtctgaaatgtatcaaaaaggaacagccttctcattataagtatcatgaaaagcactatgccaatgcagctatatttgcagattctaaaaaccagaaaaccatttgtcagcaagctgttgacacagttctggccaagaaaagagtagactctctccagcttaccagggagcagatgttgacaaataggttcagaatggacataatgtttggctcaactggatctgcagatatagaggagtggatggctggagtggcctggctgcactgtctcctccctaaaatggacagtgtagtctatgacttccttaagtgtatggtctataatatccctaaaaagagatactggttgttcaagggacccattgattcagggaaaactacccttgctgctgcacttctggaactctgtggtgggaaagctctcaatgtcaacctgccacttgatagactcaactttgagctgggggtggcaattgatcagtttttggtagtgtttgaagatgtgaaaggtacaggaggagagtccagggatttgcctagtggccaaggcatcaacaatctggacaacctcagagactacctggatgggtctgtaaaggtcaaccttgaaaaaaagcatctcaacaagaggactcaaatatttccacctggaatagtcactatgaatgaatattcagtgcccaagaccctccaggctagatttgtcaagcaaattgatttcagacctaaagattatctgaaacattgtttggagaggagtgagttcctccttgagaaaaggattattcagtcaggaatagcactgcttcttatgctgatatggtatagaccagtggctgagtttgcccaaagcattcagagtagaatagttgagtggaaagaaaggcttgacaaggagttttctctttcagtatatcaaaagatgaagttcaatgtggctatgggtattggagtgcttgattggttgagaaacagtgatgatgatgatgaagattctcaggaaaatgctgataaaaatgaggatgggggagagaagaatatggaagattctggtcatgaaactggcattgatagtcagagccaggggagtttccaggctccacagagctcccaaagtgtccatgaccacaaccagccttaccatatatgcagaggttttacttgtttcaagaaacctcccactccccctccagaacctgaaacatgagcggccgcgactctagatcataatcagccataccacacctccccctgaacctgaaaaatcaatgcaattattgttgaaataaagcacccagcaatgcctgggaccatgtaaaactgtcctggttctttccaaggtatagagcatagcccacaggctgatatttctggccagggttggttggaggacagccttgtctataggaagagaatgaggtttttgcactataagggcatgcaagtcagtcccgcccctaactccacctggttgcccatcccgcccctaactccgcccagttccgcccattctccgccccatggctgactaattttttttatttatgcagaggcggaggccgcctcggcctctgagctattccagaagtagtgaggaggcttttttggaggcccttaattaaattgacatatctacctaatttgtgtataataaccctgataaatgcttcaataatattgaaaaaggaagagtcctgtataaaaagaaccagctgtggaatgtgtgtcagttagtaggcttatgcaaagtagcccgcccaagagacaggctgaggcccgcccaccatgatagaacaagatggacttcatgctggatctcctgcagcatgggtggaaagactttttggttatgattgggctcagcagaccattggatgttctgatgctgctgtgttcaggcttagtgcacagggtaggccagtgctctttgtgaagactgatctctctggagctttgaatgaactgcaggatgaggctgctaggctttcatggctggccaccacaggtgtcccttgtgctgcagtgttggatgtggttactgaggctgggagggattggctcctcctgggagaagtgccaggtcaggatctgttgagttctcacctggctccagctgaaaaagtctccataatggcagatgctatgagaaggctgcacacattggacccagctacatgcccatttgaccatcaggccaaacacaggattgagagggccagaacaagaatggaggctgggttggtggaccaggatgaccttgatgaggagcatcagggcctggctccagctgaattgtttgccaggctcaaggctagtatgcctgatggggaggatctggtggtaactcatggtgatgcctgtttgcctaacatcatggtggaaaatggaaggttctctggattcattgattgtggaagactgggtgtagctgacaggtatcaggacatagctcttgcaacaagggatattgcagaggagttgggtggagaatgggctgacaggttcctggtcttgtatggcattgctgccccagacagccaaagaattgctttctataggctgttggatgagtttttctaagctcagcacccacaaagctctcaggtcctaagagacactggcacccatatccatgcatcccttgtataaataaagcatccagcaaagctggtaccatgtaaaactgtcttggttgtttccaaggtatagagcatagctcaataggtttttgactttgtcccgcccctctaagtcctgcacacagatactccaatatgacatacagcatgcttgggaactgagtgcccccatgtgggcagagagcaccatgtgccacagtccctgagaagttcttgggaagggtgggcaattgccatgtgtgcctagagaaggttgtttgtaatactgccaagtgccatgtggtgtgatattggctccatgtgccttgtttgtaataacatttccatgtgtcttgggaagaaccatatataagcagagctggtttagtgaaccctcagataggcctagaccatggccagcagtgagaatgtcataacagagttcatgagattcaaggtgaggatggagggaactgtcaatggtcatgagtttgagattgaaggggaaggggagggcagaccctatgagggccacaacacagtcaaattgaaggtgaccaaagggggaccccttccctttgcctgggacatcctgagcccacagtttcagtatggttccaaagtttatgtaaagcaccctgctgacatccctgactacaagaaactgtccttcccagaaggattcaagtgggaaagggtcatgaactttgaggatggaggggttgcaacagtgacccaggacagttctctccaagatggctgtttcatctacaaggtaaaattcattggtgtgaactttccctctgatggcccagtgatgcaaaaaaagaccatgggctgggaagcctcaacagaaaggctgtaccctagagatggagttctcaagggtgagacccacaaagctctaaagctcaaagatgggggccactatctggtggagttcaagagcatctacatggcaaaaaagccagtgcagttgcctggctattactatgtggatgccaagcttgacataacctcacacaatgaagactacactattgtggaacagtatgagaggactgagggaagacatcatctgtttctgtgaattcgcactgcatggacttacctgcctggtggtatcagtcacaggctctgataaggattcagctgttgtataaataaagcatgcagcctagcaggaaccatgttaatctctcttggttgtttccttggaatactcctaagcacattaggtttttagatctgtagaaaagatcaaaggatcttcttgagatcctttttttctgcgcgtaatctgctgcttgcaaacaaaaaaaccaccgctaccagcggtggtttgtttgccggatcaagagctaccaactctttttccgaaggtaactggcttcagcagagcgcagataccaaatactgtccttctagtgtagccgtagttaggccaccacttcaagaactctgtagcaccgcctacatacctcgctctgctaatcctgttaccagtggctgctgccagtggcgataagtcgtgtcttaccgggttggactcaagacgatagttaccggataaggcgcagcggtcgggctgaacggggggttcgtgcacacagcccagcttggagcgaacgacctacaccgaactgagatacctacagcgtgagctatgagaaagcgccacgcttcccgaagggagaaaggcggacaggtatccggtaagcggcagggtcggaacaggagagcgcacgagggagcttccagggggaaacgcctggtatctttatagtcctgtcgggtttcgccacctctgacttgagcgtcgatttttgtgatgctcgtcaggggggcggagcctatggaaaaacgccagcaacgcggcctttttacgg

SEQ ID NO: 646 - DNA, 7310 bp, Artificial Sequence
  pCzGFP-I-T(delta 334-444)-BB3
  CDS (1917)...(4007): Large T Antigen (delta 334-444)
ttcctattaatagtaatcaattacggggtcattagttcatagcccatatatggagttccgcgttacataacttacggtaaatggcccgcctggctgaccgcccaacgacccccgcccattgacgtcaataatgacgtatgttcccatagtaacgccaatagggactttccattgacgtcaatgggtggagtatttacggtaaactgcccacttggcagtacatcaagtgtatcatatgccaagtacgccccctattgacgtcaatgacggtaaatggcccgcctggcattatgcccagtacatgaccttatgggactttcctacttggcagtacatctacgtattagtcatcgctattaccatggtgatgcggttttggcagtacatcaatgggcgtggatagcggtttgactcacggggatttccaagtctccaccccattgacgtcaatgggagtttgttttggcaccaaaatcaacgggactttccaaaatgtcgtaacaactccgccccattgacgcaaatgggcggtaggcgtgtacggtgggaggtctatataagcagagctggtttagtgaaccgtcagatccgctagctagaccatggtgagcaagggagaggaactctttacaggtgtggtcccaattctggtggagctggatggagatgtgaatgggcacaaattttctgtcagtggagagggagagggggatgctacctatggcaaactgactctgaagttcatctgcactactggcaagctgcctgtgccatggccaactctggtgacaaccctcacctatggagtccagtgcttttccagatatcctgaccacatgaaacagcatgactttttcaaatctgcaatgcctgagggctatgtgcaagagagaactatctttttcaaggatgatgggaactataagactagggctgaggtgaaatttgaaggagacaccctggtcaataggattgagctcaaggggattgacttcaaggaggatggcaacattctgggccataagctggagtataattacaattcccacaatgtctacattatggctgacaagcagaagaatggcattaaggtcaacttcaagattagacacaacatagaggatggatctgtgcagctggctgaccattaccagcagaatacacctattggggatgggccagtgctgctccctgacaatcactatctgagcacccaatctgctttgtctaaagatcctaatgaaaagagagatcacatggtgctgctggagtttgtaactgctgcaggaattaccttgggtatggatgaactctataagtaaggatccgcccctctccctcccccccccctaacgttactggccgaagccgcttggaataaggccggtgtgcgtttgtctatatgttattttccaccatattgccgtcttttggcaatgtgagggcccggaaacctggccctgtcttcttgacgagcattcctaggggtctttcccctctcgccaaaggaatgcaaggtctgttgaatgtcgtgaaggaagcagttcctctggaagcttcttgaagacaaacaacgtctgtagcgaccctttgcaggcagcggaaccccccacctggcgacaggtgcctctgcggccaaaagccacgtgtataagatacacctgcaaaggcggcacaaccccagtgccacgttgtgagttggatagttgtggaaagagtcaaatggctctcctcaagcgtattcaacaaggggctgaaggatgcccagaaggtaccccattgtatgggatctgatctggggcctcggtgcacatgctttacatgtgtttagtcgaggttaaaaaaacgtctaggccccccgaaccacggggacgtggttttcctttgaaaaacacgatgataatatggccacaaccatggacaaagtgctgaatagggaggaaagtctgcaactgatggatctgttgggacttgagaggtctgcatggggtaatatcccacttatgaggaaagcatacctgaagaagtgtaaagagttccatcctgacaaaggtggagatgaagagaagatgaaaaagatgaacacactgtataagaaaatggaagatggtgtaaagtatgctcaccagccagattttggaggtttttgggatgccacagagatacctacttatggtacagatgagtgggaacagtggtggaatgcatttaatgaagagaatttgttttgctctgaggaaatgcctagttctgatgatgaggccacagctgactcccagcacagtactccacccaagaaaaagagaaaagtggaagacccaaaggatttcccctctgaactcttgtccttcttgtctcatgcagtgttctcaaataggaccctggcttgctttgctatctacactactaaggagaaggcagctctcttgtacaagaaaatcatggaaaagtattctgtcacctttatttccaggcacaactcctataatcataatattctctttttcttgacaccccataggcatagggtgagtgcaattaacaactatgctcagaagttgtgtactttctccttcctgatctgtaagggtgtgaataaggagtatctcatgtattcagccctgaccagagacccctttagtgtgattgaagaatccctgcctggtgggctcaaggagcatgatttcaacccagaagaggctgaagaaacaaaacaggtgagctggaagcttgtgactgaatatgcaatggagacaaagtgtgatgatgtcctgctcctcctgggaatgtacctggaatttcagtatagctttgaaatgtgtctgaaatgtatcaaaaaggaacagccttctcattataagtatcatgaaaagcactatgccaatgcagctatatttgcagattctaaaaaccagaaaaccatttgtcagcaagctgttgacacagttctggccaagaaaagagtagactctctccagcttaccagggagcagatgttgacaaataggttcaatgaccttctggacagaatggacataatgtttggctcaactggatctgcagatatagaggagtggatggctggagtggcctggctgcactgtctcctccctaaaatggacagtgtagtctatgacttccttaagtgtatggtctataatatccctaaaaagagatactggttgttcaagggacccattgattcagggaaaactgggaaagctctcaatgtcaacctgccacttgatagactcaactttgagctgggggtggcaattgatcagtttttggtagtgtttgaagatgtgaaaggtacaggaggagagtccagggatttgcctagtggccaaggcatcaacaatctggacaacctcagagactacctggatgggtctgtaaaggtcaaccttgaaaaaaagcatctcaacaagaggactcaaatatttccacctggaatagtcactatgaatgaatattcagtgcccaagaccctccaggctagatttgtcaagcaaattgatttcagacctaaagattatctgaaacattgtttggagaggagtgagttcctccttgagaaaaggattattcagtcaggaatagcactgcttcttatgctgatatggtatagaccagtggctgagtttgcccaaagcattcagagtagaatagttgagtggaaagaaaggcttgacaaggagttttctctttcagtatatcaaaagatgaagttcaatgtggctatgggtattggagtgcttgattggttgagaaacagtgatgatgatgatgaagattctcaggaaaatgctgataaaaatgaggatgggggagagaagaatatggaagattctggtcatgaaactggcattgatagtcagagccaggggagtttccaggctccacagagctcccaaagtgtccatgaccacaaccagccttaccatatatgcagaggttttacttgtttcaagaaacctcccactccccctccagaacctgaaacatgagcggccgcgactctagatcataatcagccataccacacctccccctgaacctgaaaaatcaatgcaattattgttgaaataaagcacccagcaatgcctgggaccatgtaaaactgtcctggttctttccaaggtatagagcatagcccacaggctgatatttctggccagggttggttggaggacagccttgtctataggaagagaatgaggtttttgcactataagggcatgcaagtcagtcccgcccctaactccacctggttgcccatcccgcccctaactccgcccagttccgcccattctccgccccatggctgactaattttttttatttatgcagaggcggaggccgcctcggcctctgagctattccagaagtagtgaggaggcttttttggaggcccttaattaaattgacatatctacctaatttgtgtataataaccctgataaatgcttcaataatattgaaaaaggaagagtcctgtataaaaagaaccagctgtggaatgtgtgtcagttagtaggcttatgcaaagtagcccgcccaagagacaggctgaggcccgcccaccatgatagaacaagatggacttcatgctggatctcctgcagcatgggtggaaagactttttggttatgattgggctcagcagaccattggatgttctgatgctgctgtgttcaggcttagtgcacagggtaggccagtgctctttgtgaagactgatctctctggagctttgaatgaactgcaggatgaggctgctaggctttcatggctggccaccacaggtgtcccttgtgctgcagtgttggatgtggttactgaggctgggagggattggctcctcctgggagaagtgccaggtcaggatctgttgagttctcacctggctccagctgaaaaagtctccataatggcagatgctatgagaaggctgcacacattggacccagctacatgcccatttgaccatcaggccaaacacaggattgagagggccagaacaagaatggaggctgggttggtggaccaggatgaccttgatgaggagcatcagggcctggctccagctgaattgtttgccaggctcaaggctagtatgcctgatggggaggatctggtggtaactcatggtgatgcctgtttgcctaacatcatggtggaaaatggaaggttctctggattcattgattgtggaagactgggtgtagctgacaggtatcaggacatagctcttgcaacaagggatattgcagaggagttgggtggagaatgggctgacaggttcctggtcttgtatggcattgctgccccagacagccaaagaattgctttctataggctgttggatgagtttttctaagctcagcacccacaaagctctcaggtcctaagagacactggcacccatatccatgcatcccttgtataaataaagcatccagcaaagctggtaccatgtaaaactgtcttggttgtttccaaggtatagagcatagctcaataggtttttgactttgtcccgcccctctaagtcctgcacacagatactccaatatgacatacagcatgcttgggaactgagtgcccccatgtgggcagagagcaccatgtgccacagtccctgagaagttcttgggaagggtgggcaattgccatgtgtgcctagagaaggttgtttgtaatactgccaagtgccatgtggtgtgatattggctccatgtgccttgtttgtaataacatttccatgtgtcttgggaagaaccatatataagcagagctggtttagtgaaccctcagataggcctagaccatggccagcagtgagaatgtcataacagagttcatgagattcaaggtgaggatggagggaactgtcaatggtcatgagtttgagattgaaggggaaggggagggcagaccctatgagggccacaacacagtcaaattgaaggtgaccaaagggggaccccttccctttgcctgggacatcctgagcccacagtttcagtatggttccaaagtttatgtaaagcaccctgctgacatccctgactacaagaaactgtccttcccagaaggattcaagtgggaaagggtcatgaactttgaggatggaggggttgcaacagtgacccaggacagttctctccaagatggctgtttcatctacaaggtaaaattcattggtgtgaactttccctctgatggcccagtgatgcaaaaaaagaccatgggctgggaagcctcaacagaaaggctgtaccctagagatggagttctcaagggtgagacccacaaagctctaaagctcaaagatgggggccactatctggtggagttcaagagcatctacatggcaaaaaagccagtgcagttgcctggctattactatgtggatgccaagcttgacataacctcacacaatgaagactacactattgtggaacagtatgagaggactgagggaagacatcatctgtttctgtgaattcgcactgcatggacttacctgcctggtggtatcagtcacaggctctgataaggattcagctgttgtataaataaagcatgcagcctagcaggaaccatgttaatctctcttggttgtttccttggaatactcctaagcacattaggtttttagatctgtagaaaagatcaaaggatcttcttgagatcctttttttctgcgcgtaatctgctgcttgcaaacaaaaaaaccaccgctaccagcggtggtttgtttgccggatcaagagctaccaactctttttccgaaggtaactggcttcagcagagcgcagataccaaatactgtccttctagtgtagccgtagttaggccaccacttcaagaactctgtagcaccgcctacatacctcgctctgctaatcctgttaccagtggctgctgccagtggcgataagtcgtgtcttaccgggttggactcaagacgatagttaccggataaggcgcagcggtcgggctgaacggggggttcgtgcacacagcccagcttggagcgaacgacctacaccgaactgagatacctacagcgtgagctatgagaaagcgccacgcttcccgaagggagaaaggcggacaggtatccggtaagcggcagggtcggaacaggagagcgcacgagggagcttccagggggaaacgcctggtatctttatagtcctgtcgggtttcgccacctctgacttgagcgtcgatttttgtgatgctcgtcaggggggcggagcctatggaaaaacgccagcaacgcggcctttttacgg

SEQ ID NO: 647 - DNA, 6920 bp, Artificial Sequence
  pCzARVp10-I-T-BB3
  CDS (603)...(896): ARVp10
ttcctattaatagtaatcaattacggggtcattagttcatagcccatatatggagttccgcgttacataacttacggtaaatggcccgcctggctgaccgcccaacgacccccgcccattgacgtcaataatgacgtatgttcccatagtaacgccaatagggactttccattgacgtcaatgggtggagtatttacggtaaactgcccacttggcagtacatcaagtgtatcatatgccaagtacgccccctattgacgtcaatgacggtaaatggcccgcctggcattatgcccagtacatgaccttatgggactttcctacttggcagtacatctacgtattagtcatcgctattaccatggtgatgcggttttggcagtacatcaatgggcgtggatagcggtttgactcacggggatttccaagtctccaccccattgacgtcaatgggagtttgttttggcaccaaaatcaacgggactttccaaaatgtcgtaacaactccgccccattgacgcaaatgggcggtaggcgtgtacggtgggaggtctatataagcagagctggtttagtgaaccgtcagatccgctagctagaccatgctcagaatgcctccaggaagttgtaatggtgctacagctgtgtttggaaatgttcactgtcaagcagctcagaatactgctggtggggatctgcaggccacttcatccatcattgcatactggccttacctggcagctggaggtggctttctcctgatagtcattatttttgccctgctgtactgttgcaaggccaaaatcaaagcagatgctgccagaagtgtcttccacagggagctggtggctctcagctctggcaagcacaatgctatggctcctccatatgatgtttaaggatccgcccctctccctcccccccccctaacgttactggccgaagccgcttggaataaggccggtgtgcgtttgtctatatgttattttccaccatattgccgtcttttggcaatgtgagggcccggaaacctggccctgtcttcttgacgagcattcctaggggtctttcccctctcgccaaaggaatgcaaggtctgttgaatgtcgtgaaggaagcagttcctctggaagcttcttgaagacaaacaacgtctgtagcgaccctttgcaggcagcggaaccccccacctggcgacaggtgcctctgcggccaaaagccacgtgtataagatacacctgcaaaggcggcacaaccccagtgccacgttgtgagttggatagttgtggaaagagtcaaatggctctcctcaagcgtattcaacaaggggctgaaggatgcccagaaggtaccccattgtatgggatctgatctggggcctcggtgcacatgctttacatgtgtttagtcgaggttaaaaaaacgtctaggccccccgaaccacggggacgtggttttcctttgaaaaacacgatgataatatggccacaaccatggacaaagtgctgaatagggaggaaagtctgcaactgatggatctgttgggacttgagaggtctgcatggggtaatatcccacttatgaggaaagcatacctgaagaagtgtaaagagttccatcctgacaaaggtggagatgaagagaagatgaaaaagatgaacacactgtataagaaaatggaagatggtgtaaagtatgctcaccagccagattttggaggtttttgggatgccacagagatacctacttatggtacagatgagtgggaacagtggtggaatgcatttaatgaagagaatttgttttgctctgaggaaatgcctagttctgatgatgaggccacagctgactcccagcacagtactccacccaagaaaaagagaaaagtggaagacccaaaggatttcccctctgaactcttgtccttcttgtctcatgcagtgttctcaaataggaccctggcttgctttgctatctacactactaaggagaaggcagctctcttgtacaagaaaatcatggaaaagtattctgtcacctttatttccaggcacaactcctataatcataatattctctttttcttgacaccccataggcatagggtgagtgcaattaacaactatgctcagaagttgtgtactttctccttcctgatctgtaagggtgtgaataaggagtatctcatgtattcagccctgaccagagacccctttagtgtgattgaagaatccctgcctggtgggctcaaggagcatgatttcaacccagaagaggctgaagaaacaaaacaggtgagctggaagcttgtgactgaatatgcaatggagacaaagtgtgatgatgtcctgctcctcctgggaatgtacctggaatttcagtatagctttgaaatgtgtctgaaatgtatcaaaaaggaacagccttctcattataagtatcatgaaaagcactatgccaatgcagctatatttgcagattctaaaaaccagaaaaccatttgtcagcaagctgttgacacagttctggccaagaaaagagtagactctctccagcttaccagggagcagatgttgacaaataggttcaatgaccttctggacagaatggacataatgtttggctcaactggatctgcagatatagaggagtggatggctggagtggcctggctgcactgtctcctccctaaaatggacagtgtagtctatgacttccttaagtgtatggtctataatatccctaaaaagagatactggttgttcaagggacccattgattcagggaaaactacccttgctgctgcacttctggaactctgtggtgggaaagctctcaatgtcaacctgccacttgatagactcaactttgagctgggggtggcaattgatcagtttttggtagtgtttgaagatgtgaaaggtacaggaggagagtccagggatttgcctagtggccaaggcatcaacaatctggacaacctcagagactacctggatgggtctgtaaaggtcaaccttgaaaaaaagcatctcaacaagaggactcaaatatttccacctggaatagtcactatgaatgaatattcagtgcccaagaccctccaggctagatttgtcaagcaaattgatttcagacctaaagattatctgaaacattgtttggagaggagtgagttcctccttgagaaaaggattattcagtcaggaatagcactgcttcttatgctgatatggtatagaccagtggctgagtttgcccaaagcattcagagtagaatagttgagtggaaagaaaggcttgacaaggagttttctctttcagtatatcaaaagatgaagttcaatgtggctatgggtattggagtgcttgattggttgagaaacagtgatgatgatgatgaagattctcaggaaaatgctgataaaaatgaggatgggggagagaagaatatggaagattctggtcatgaaactggcattgatagtcagagccaggggagtttccaggctccacagagctcccaaagtgtccatgaccacaaccagccttaccatatatgcagaggttttacttgtttcaagaaacctcccactccccctccagaacctgaaacatgagcggccgcgactctagatcataatcagccataccacacctccccctgaacctgaaaaatcaatgcaattattgttgaaataaagcacccagcaatgcctgggaccatgtaaaactgtcctggttctttccaaggtatagagcatagcccacaggctgatatttctggccagggttggttggaggacagccttgtctataggaagagaatgaggtttttgcactataagggcatgcaagtcagtcccgcccctaactccacctggttgcccatcccgcccctaactccgcccagttccgcccattctccgccccatggctgactaattttttttatttatgcagaggcggaggccgcctcggcctctgagctattccagaagtagtgaggaggcttttttggaggcccttaattaaattgacatatctacctaatttgtgtataataaccctgataaatgcttcaataatattgaaaaaggaagagtcctgtataaaaagaaccagctgtggaatgtgtgtcagttagtaggcttatgcaaagtagcccgcccaagagacaggctgaggcccgcccaccatgatagaacaagatggacttcatgctggatctcctgcagcatgggtggaaagactttttggttatgattgggctcagcagaccattggatgttctgatgctgctgtgttcaggcttagtgcacagggtaggccagtgctctttgtgaagactgatctctctggagctttgaatgaactgcaggatgaggctgctaggctttcatggctggccaccacaggtgtcccttgtgctgcagtgttggatgtggttactgaggctgggagggattggctcctcctgggagaagtgccaggtcaggatctgttgagttctcacctggctccagctgaaaaagtctccataatggcagatgctatgagaaggctgcacacattggacccagctacatgcccatttgaccatcaggccaaacacaggattgagagggccagaacaagaatggaggctgggttggtggaccaggatgaccttgatgaggagcatcagggcctggctccagctgaattgtttgccaggctcaaggctagtatgcctgatggggaggatctggtggtaactcatggtgatgcctgtttgcctaacatcatggtggaaaatggaaggttctctggattcattgattgtggaagactgggtgtagctgacaggtatcaggacatagctcttgcaacaagggatattgcagaggagttgggtggagaatgggctgacaggttcctggtcttgtatggcattgctgccccagacagccaaagaattgctttctataggctgttggatgagtttttctaagctcagcacccacaaagctctcaggtcctaagagacactggcacccatatccatgcatcccttgtataaataaagcatccagcaaagctggtaccatgtaaaactgtcttggttgtttccaaggtatagagcatagctcaataggtttttgactttgtcccgcccctctaagtcctgcacacagatactccaatatgacatacagcatgcttgggaactgagtgcccccatgtgggcagagagcaccatgtgccacagtccctgagaagttcttgggaagggtgggcaattgccatgtgtgcctagagaaggttgtttgtaatactgccaagtgccatgtggtgtgatattggctccatgtgccttgtttgtaataacatttccatgtgtcttgggaagaaccatatataagcagagctggtttagtgaaccctcagataggcctagaccatggccagcagtgagaatgtcataacagagttcatgagattcaaggtgaggatggagggaactgtcaatggtcatgagtttgagattgaaggggaaggggagggcagaccctatgagggccacaacacagtcaaattgaaggtgaccaaagggggaccccttccctttgcctgggacatcctgagcccacagtttcagtatggttccaaagtttatgtaaagcaccctgctgacatccctgactacaagaaactgtccttcccagaaggattcaagtgggaaagggtcatgaactttgaggatggaggggttgcaacagtgacccaggacagttctctccaagatggctgtttcatctacaaggtaaaattcattggtgtgaactttccctctgatggcccagtgatgcaaaaaaagaccatgggctgggaagcctcaacagaaaggctgtaccctagagatggagttctcaagggtgagacccacaaagctctaaagctcaaagatgggggccactatctggtggagttcaagagcatctacatggcaaaaaagccagtgcagttgcctggctattactatgtggatgccaagcttgacataacctcacacaatgaagactacactattgtggaacagtatgagaggactgagggaagacatcatctgtttctgtgaattcgcactgcatggacttacctgcctggtggtatcagtcacaggctctgataaggattcagctgttgtataaataaagcatgcagcctagcaggaaccatgttaatctctcttggttgtttccttggaatactcctaagcacattaggtttttagatctgtagaaaagatcaaaggatcttcttgagatcctttttttctgcgcgtaatctgctgcttgcaaacaaaaaaaccaccgctaccagcggtggtttgtttgccggatcaagagctaccaactctttttccgaaggtaactggcttcagcagagcgcagataccaaatactgtccttctagtgtagccgtagttaggccaccacttcaagaactctgtagcaccgcctacatacctcgctctgctaatcctgttaccagtggctgctgccagtggcgataagtcgtgtcttaccgggttggactcaagacgatagttaccggataaggcgcagcggtcgggctgaacggggggttcgtgcacacagcccagcttggagcgaacgacctacaccgaactgagatacctacagcgtgagctatgagaaagcgccacgcttcccgaagggagaaaggcggacaggtatccggtaagcggcagggtcggaacaggagagcgcacgagggagcttccagggggaaacgcctggtatctttatagtcctgtcgggtttcgccacctctgacttgagcgtcgatttttgtgatgctcgtcaggggggcggagcctatggaaaaacgccagcaacgcggcctttttacgg

SEQ ID NO: 648 - DNA, 6793 bp, Artificial Sequence
  pCzARVp10-I-T-dSV
  CDS (603)...(896): ARVp10
ttcctattaatagtaatcaattacggggtcattagttcatagcccatatatggagttccgcgttacataacttacggtaaatggcccgcctggctgaccgcccaacgacccccgcccattgacgtcaataatgacgtatgttcccatagtaacgccaatagggactttccattgacgtcaatgggtggagtatttacggtaaactgcccacttggcagtacatcaagtgtatcatatgccaagtacgccccctattgacgtcaatgacggtaaatggcccgcctggcattatgcccagtacatgaccttatgggactttcctacttggcagtacatctacgtattagtcatcgctattaccatggtgatgcggttttggcagtacatcaatgggcgtggatagcggtttgactcacggggatttccaagtctccaccccattgacgtcaatgggagtttgttttggcaccaaaatcaacgggactttccaaaatgtcgtaacaactccgccccattgacgcaaatgggcggtaggcgtgtacggtgggaggtctatataagcagagctggtttagtgaaccgtcagatccgctagctagaccatgctcagaatgcctccaggaagttgtaatggtgctacagctgtgtttggaaatgttcactgtcaagcagctcagaatactgctggtggggatctgcaggccacttcatccatcattgcatactggccttacctggcagctggaggtggctttctcctgatagtcattatttttgccctgctgtactgttgcaaggccaaaatcaaagcagatgctgccagaagtgtcttccacagggagctggtggctctcagctctggcaagcacaatgctatggctcctccatatgatgtttaaggatccgcccctctccctcccccccccctaacgttactggccgaagccgcttggaataaggccggtgtgcgtttgtctatatgttattttccaccatattgccgtcttttggcaatgtgagggcccggaaacctggccctgtcttcttgacgagcattcctaggggtctttcccctctcgccaaaggaatgcaaggtctgttgaatgtcgtgaaggaagcagttcctctggaagcttcttgaagacaaacaacgtctgtagcgaccctttgcaggcagcggaaccccccacctggcgacaggtgcctctgcggccaaaagccacgtgtataagatacacctgcaaaggcggcacaaccccagtgccacgttgtgagttggatagttgtggaaagagtcaaatggctctcctcaagcgtattcaacaaggggctgaaggatgcccagaaggtaccccattgtatgggatctgatctggggcctcggtgcacatgctttacatgtgtttagtcgaggttaaaaaaacgtctaggccccccgaaccacggggacgtggttttcctttgaaaaacacgatgataatatggccacaaccatggacaaagtgctgaatagggaggaaagtctgcaactgatggatctgttgggacttgagaggtctgcatggggtaatatcccacttatgaggaaagcatacctgaagaagtgtaaagagttccatcctgacaaaggtggagatgaagagaagatgaaaaagatgaacacactgtataagaaaatggaagatggtgtaaagtatgctcaccagccagattttggaggtttttgggatgccacagagatacctacttatggtacagatgagtgggaacagtggtggaatgcatttaatgaagagaatttgttttgctctgaggaaatgcctagttctgatgatgaggccacagctgactcccagcacagtactccacccaagaaaaagagaaaagtggaagacccaaaggatttcccctctgaactcttgtccttcttgtctcatgcagtgttctcaaataggaccctggcttgctttgctatctacactactaaggagaaggcagctctcttgtacaagaaaatcatggaaaagtattctgtcacctttatttccaggcacaactcctataatcataatattctctttttcttgacaccccataggcatagggtgagtgcaattaacaactatgctcagaagttgtgtactttctccttcctgatctgtaagggtgtgaataaggagtatctcatgtattcagccctgaccagagacccctttagtgtgattgaagaatccctgcctggtgggctcaaggagcatgatttcaacccagaagaggctgaagaaacaaaacaggtgagctggaagcttgtgactgaatatgcaatggagacaaagtgtgatgatgtcctgctcctcctgggaatgtacctggaatttcagtatagctttgaaatgtgtctgaaatgtatcaaaaaggaacagccttctcattataagtatcatgaaaagcactatgccaatgcagctatatttgcagattctaaaaaccagaaaaccatttgtcagcaagctgttgacacagttctggccaagaaaagagtagactctctccagcttaccagggagcagatgttgacaaataggttcaatgaccttctggacagaatggacataatgtttggctcaactggatctgcagatatagaggagtggatggctggagtggcctggctgcactgtctcctccctaaaatggacagtgtagtctatgacttccttaagtgtatggtctataatatccctaaaaagagatactggttgttcaagggacccattgattcagggaaaactacccttgctgctgcacttctggaactctgtggtgggaaagctctcaatgtcaacctgccacttgatagactcaactttgagctgggggtggcaattgatcagtttttggtagtgtttgaagatgtgaaaggtacaggaggagagtccagggatttgcctagtggccaaggcatcaacaatctggacaacctcagagactacctggatgggtctgtaaaggtcaaccttgaaaaaaagcatctcaacaagaggactcaaatatttccacctggaatagtcactatgaatgaatattcagtgcccaagaccctccaggctagatttgtcaagcaaattgatttcagacctaaagattatctgaaacattgtttggagaggagtgagttcctccttgagaaaaggattattcagtcaggaatagcactgcttcttatgctgatatggtatagaccagtggctgagtttgcccaaagcattcagagtagaatagttgagtggaaagaaaggcttgacaaggagttttctctttcagtatatcaaaagatgaagttcaatgtggctatgggtattggagtgcttgattggttgagaaacagtgatgatgatgatgaagattctcaggaaaatgctgataaaaatgaggatgggggagagaagaatatggaagattctggtcatgaaactggcattgatagtcagagccaggggagtttccaggctccacagagctcccaaagtgtccatgaccacaaccagccttaccatatatgcagaggttttacttgtttcaagaaacctcccactccccctccagaacctgaaacatgagcggccgcgactctagatcataatcagccataccacacctccccctgaacctgaaaaatcaatgcaattattgttgaaataaagcacccagcaatgcctgggaccatgtaaaactgtcctggttctttccaaggtatagagcatagcccacaggctgatatttctggccagggttggttggaggacagccttgtctataggaagagaatgaggtttttgcactataagggcatgcaagtcagtcccgcccctaactccacctggttaggaggggaggaggataattaaattgacatatctacctaatttgtgtataataaccctgataaatgcttcaataatattgaaaaaggaagagtcctgtataaaaagaaccagctgtggaatgtgtgtcagttagtaggcttatgcaaagtagcccgcccaagagacaggctgaggcccgcccaccatgatagaacaagatggacttcatgctggatctcctgcagcatgggtggaaagactttttggttatgattgggctcagcagaccattggatgttctgatgctgctgtgttcaggcttagtgcacagggtaggccagtgctctttgtgaagactgatctctctggagctttgaatgaactgcaggatgaggctgctaggctttcatggctggccaccacaggtgtcccttgtgctgcagtgttggatgtggttactgaggctgggagggattggctcctcctgggagaagtgccaggtcaggatctgttgagttctcacctggctccagctgaaaaagtctccataatggcagatgctatgagaaggctgcacacattggacccagctacatgcccatttgaccatcaggccaaacacaggattgagagggccagaacaagaatggaggctgggttggtggaccaggatgaccttgatgaggagcatcagggcctggctccagctgaattgtttgccaggctcaaggctagtatgcctgatggggaggatctggtggtaactcatggtgatgcctgtttgcctaacatcatggtggaaaatggaaggttctctggattcattgattgtggaagactgggtgtagctgacaggtatcaggacatagctcttgcaacaagggatattgcagaggagttgggtggagaatgggctgacaggttcctggtcttgtatggcattgctgccccagacagccaaagaattgctttctataggctgttggatgagtttttctaagctcagcacccacaaagctctcaggtcctaagagacactggcacccatatccatgcatcccttgtataaataaagcatccagcaaagctggtaccatgtaaaactgtcttggttgtttccaaggtatagagcatagctcaataggtttttgactttgtcccgcccctctaagtcctgcacacagatactccaatatgacatacagcatgcttgggaactgagtgcccccatgtgggcagagagcaccatgtgccacagtccctgagaagttcttgggaagggtgggcaattgccatgtgtgcctagagaaggttgtttgtaatactgccaagtgccatgtggtgtgatattggctccatgtgccttgtttgtaataacatttccatgtgtcttgggaagaaccatatataagcagagctggtttagtgaaccctcagataggcctagaccatggccagcagtgagaatgtcataacagagttcatgagattcaaggtgaggatggagggaactgtcaatggtcatgagtttgagattgaaggggaaggggagggcagaccctatgagggccacaacacagtcaaattgaaggtgaccaaagggggaccccttccctttgcctgggacatcctgagcccacagtttcagtatggttccaaagtttatgtaaagcaccctgctgacatccctgactacaagaaactgtccttcccagaaggattcaagtgggaaagggtcatgaactttgaggatggaggggttgcaacagtgacccaggacagttctctccaagatggctgtttcatctacaaggtaaaattcattggtgtgaactttccctctgatggcccagtgatgcaaaaaaagaccatgggctgggaagcctcaacagaaaggctgtaccctagagatggagttctcaagggtgagacccacaaagctctaaagctcaaagatgggggccactatctggtggagttcaagagcatctacatggcaaaaaagccagtgcagttgcctggctattactatgtggatgccaagcttgacataacctcacacaatgaagactacactattgtggaacagtatgagaggactgagggaagacatcatctgtttctgtgaattcgcactgcatggacttacctgcctggtggtatcagtcacaggctctgataaggattcagctgttgtataaataaagcatgcagcctagcaggaaccatgttaatctctcttggttgtttccttggaatactcctaagcacattaggtttttagatctgtagaaaagatcaaaggatcttcttgagatcctttttttctgcgcgtaatctgctgcttgcaaacaaaaaaaccaccgctaccagcggtggtttgtttgccggatcaagagctaccaactctttttccgaaggtaactggcttcagcagagcgcagataccaaatactgtccttctagtgtagccgtagttaggccaccacttcaagaactctgtagcaccgcctacatacctcgctctgctaatcctgttaccagtggctgctgccagtggcgataagtcgtgtcttaccgggttggactcaagacgatagttaccggataaggcgcagcggtcgggctgaacggggggttcgtgcacacagcccagcttggagcgaacgacctacaccgaactgagatacctacagcgtgagctatgagaaagcgccacgcttcccgaagggagaaaggcggacaggtatccggtaagcggcagggtcggaacaggagagcgcacgagggagcttccagggggaaacgcctggtatctttatagtcctgtcgggtttcgccacctctgacttgagcgtcgatttttgtgatgctcgtcaggggggcggagcctatggaaaaacgccagcaacgcggcctttttacgg

SEQ ID NO: 649 - DNA, 7001 bp, Artificial Sequence
  pCzRRVp14-I-T-BB3
ttcctattaatagtaatcaattacggggtcattagttcatagcccatatatggagttccgcgttacataacttacggtaaatggcccgcctggctgaccgcccaacgacccccgcccattgacgtcaataatgacgtatgttcccatagtaacgccaatagggactttccattgacgtcaatgggtggagtatttacggtaaactgcccacttggcagtacatcaagtgtatcatatgccaagtacgccccctattgacgtcaatgacggtaaatggcccgcctggcattatgcccagtacatgaccttatgggactttcctacttggcagtacatctacgtattagtcatcgctattaccatggtgatgcggttttggcagtacatcaatgggcgtggatagcggtttgactcacggggatttccaagtctccaccccattgacgtcaatgggagtttgttttggcaccaaaatcaacgggactttccaaaatgtcgtaacaactccgccccattgacgcaaatgggcggtaggcgtgtacggtgggaggtctatataagcagagctggtttagtgaaccgtcagatccgctagctagaccatgggatctgggccatctaattttgttaatcatgcacctggggaagccattgtgactgggctggagaagggagcagataaagttgctgggaccatcagccacactatttgggaggtcattgcaggcttggtggctcttttgaccttcctggcatttggcttctggctgttcaagtacctgcagaagaggagagaaagaaggagacagctcacagaattccagaagaggtatctgagaaattcctacagattgtcagaaattcaaaggccaatttctcagcatgagtatgaagacccctatgagcctccatccagaaggaaacctccccctccaccttactccacttatgtgaatattgacaatgtatctgccatataaggatccgcccctctccctcccccccccctaacgttactggccgaagccgcttggaataaggccggtgtgcgtttgtctatatgttattttccaccatattgccgtcttttggcaatgtgagggcccggaaacctggccctgtcttcttgacgagcattcctaggggtctttcccctctcgccaaaggaatgcaaggtctgttgaatgtcgtgaaggaagcagttcctctggaagcttcttgaagacaaacaacgtctgtagcgaccctttgcaggcagcggaaccccccacctggcgacaggtgcctctgcggccaaaagccacgtgtataagatacacctgcaaaggcggcacaaccccagtgccacgttgtgagttggatagttgtggaaagagtcaaatggctctcctcaagcgtattcaacaaggggctgaaggatgcccagaaggtaccccattgtatgggatctgatctggggcctcggtgcacatgctttacatgtgtttagtcgaggttaaaaaaacgtctaggccccccgaaccacggggacgtggttttcctttgaaaaacacgatgataatatggccacaaccatggacaaagtgctgaatagggaggaaagtctgcaactgatggatctgttgggacttgagaggtctgcatggggtaatatcccacttatgaggaaagcatacctgaagaagtgtaaagagttccatcctgacaaaggtggagatgaagagaagatgaaaaagatgaacacactgtataagaaaatggaagatggtgtaaagtatgctcaccagccagattttggaggtttttgggatgccacagagatacctacttatggtacagatgagtgggaacagtggtggaatgcatttaatgaagagaatttgttttgctctgaggaaatgcctagttctgatgatgaggccacagctgactcccagcacagtactccacccaagaaaaagagaaaagtggaagacccaaaggatttcccctctgaactcttgtccttcttgtctcatgcagtgttctcaaataggaccctggcttgctttgctatctacactactaaggagaaggcagctctcttgtacaagaaaatcatggaaaagtattctgtcacctttatttccaggcacaactcctataatcataatattctctttttcttgacaccccataggcatagggtgagtgcaattaacaactatgctcagaagttgtgtactttctccttcctgatctgtaagggtgtgaataaggagtatctcatgtattcagccctgaccagagacccctttagtgtgattgaagaatccctgcctggtgggctcaaggagcatgatttcaacccagaagaggctgaagaaacaaaacaggtgagctggaagcttgtgactgaatatgcaatggagacaaagtgtgatgatgtcctgctcctcctgggaatgtacctggaatttcagtatagctttgaaatgtgtctgaaatgtatcaaaaaggaacagccttctcattataagtatcatgaaaagcactatgccaatgcagctatatttgcagattctaaaaaccagaaaaccatttgtcagcaagctgttgacacagttctggccaagaaaagagtagactctctccagcttaccagggagcagatgttgacaaataggttcaatgaccttctggacagaatggacataatgtttggctcaactggatctgcagatatagaggagtggatggctggagtggcctggctgcactgtctcctccctaaaatggacagtgtagtctatgacttccttaagtgtatggtctataatatccctaaaaagagatactggttgttcaagggacccattgattcagggaaaactacccttgctgctgcacttctggaactctgtggtgggaaagctctcaatgtcaacctgccacttgatagactcaactttgagctgggggtggcaattgatcagtttttggtagtgtttgaagatgtgaaaggtacaggaggagagtccagggatttgcctagtggccaaggcatcaacaatctggacaacctcagagactacctggatgggtctgtaaaggtcaaccttgaaaaaaagcatctcaacaagaggactcaaatatttccacctggaatagtcactatgaatgaatattcagtgcccaagaccctccaggctagatttgtcaagcaaattgatttcagacctaaagattatctgaaacattgtttggagaggagtgagttcctccttgagaaaaggattattcagtcaggaatagcactgcttcttatgctgatatggtatagaccagtggctgagtttgcccaaagcattcagagtagaatagttgagtggaaagaaaggcttgacaaggagttttctctttcagtatatcaaaagatgaagttcaatgtggctatgggtattggagtgcttgattggttgagaaacagtgatgatgatgatgaagattctcaggaaaatgctgataaaaatgaggatgggggagagaagaatatggaagattctggtcatgaaactggcattgatagtcagagccaggggagtttccaggctccacagagctcccaaagtgtccatgaccacaaccagccttaccatatatgcagaggttttacttgtttcaagaaacctcccactccccctccagaacctgaaacatgagcggccgcgactctagatcataatcagccataccacacctccccctgaacctgaaaaatcaatgcaattattgttgaaataaagcacccagcaatgcctgggaccatgtaaaactgtcctggttctttccaaggtatagagcatagcccacaggctgatatttctggccagggttggttggaggacagccttgtctataggaagagaatgaggtttttgcactataagggcatgcaagtcagtcccgcccctaactccacctggttgcccatcccgcccctaactccgcccagttccgcccattctccgccccatggctgactaattttttttatttatgcagaggcggaggccgcctcggcctctgagctattccagaagtagtgaggaggcttttttggaggcccttaattaaattgacatatctacctaatttgtgtataataaccctgataaatgcttcaataatattgaaaaaggaagagtcctgtataaaaagaaccagctgtggaatgtgtgtcagttagtaggcttatgcaaagtagcccgcccaagagacaggctgaggcccgcccaccatgatagaacaagatggacttcatgctggatctcctgcagcatgggtggaaagactttttggttatgattgggctcagcagaccattggatgttctgatgctgctgtgttcaggcttagtgcacagggtaggccagtgctctttgtgaagactgatctctctggagctttgaatgaactgcaggatgaggctgctaggctttcatggctggccaccacaggtgtcccttgtgctgcagtgttggatgtggttactgaggctgggagggattggctcctcctgggagaagtgccaggtcaggatctgttgagttctcacctggctccagctgaaaaagtctccataatggcagatgctatgagaaggctgcacacattggacccagctacatgcccatttgaccatcaggccaaacacaggattgagagggccagaacaagaatggaggctgggttggtggaccaggatgaccttgatgaggagcatcagggcctggctccagctgaattgtttgccaggctcaaggctagtatgcctgatggggaggatctggtggtaactcatggtgatgcctgtttgcctaacatcatggtggaaaatggaaggttctctggattcattgattgtggaagactgggtgtagctgacaggtatcaggacatagctcttgcaacaagggatattgcagaggagttgggtggagaatgggctgacaggttcctggtcttgtatggcattgctgccccagacagccaaagaattgctttctataggctgttggatgagtttttctaagctcagcacccacaaagctctcaggtcctaagagacactggcacccatatccatgcatcccttgtataaataaagcatccagcaaagctggtaccatgtaaaactgtcttggttgtttccaaggtatagagcatagctcaataggtttttgactttgtcccgcccctctaagtcctgcacacagatactccaatatgacatacagcatgcttgggaactgagtgcccccatgtgggcagagagcaccatgtgccacagtccctgagaagttcttgggaagggtgggcaattgccatgtgtgcctagagaaggttgtttgtaatactgccaagtgccatgtggtgtgatattggctccatgtgccttgtttgtaataacatttccatgtgtcttgggaagaaccatatataagcagagctggtttagtgaaccctcagataggcctagaccatggccagcagtgagaatgtcataacagagttcatgagattcaaggtgaggatggagggaactgtcaatggtcatgagtttgagattgaaggggaaggggagggcagaccctatgagggccacaacacagtcaaattgaaggtgaccaaagggggaccccttccctttgcctgggacatcctgagcccacagtttcagtatggttccaaagtttatgtaaagcaccctgctgacatccctgactacaagaaactgtccttcccagaaggattcaagtgggaaagggtcatgaactttgaggatggaggggttgcaacagtgacccaggacagttctctccaagatggctgtttcatctacaaggtaaaattcattggtgtgaactttccctctgatggcccagtgatgcaaaaaaagaccatgggctgggaagcctcaacagaaaggctgtaccctagagatggagttctcaagggtgagacccacaaagctctaaagctcaaagatgggggccactatctggtggagttcaagagcatctacatggcaaaaaagccagtgcagttgcctggctattactatgtggatgccaagcttgacataacctcacacaatgaagactacactattgtggaacagtatgagaggactgagggaagacatcatctgtttctgtgaattcgcactgcatggacttacctgcctggtggtatcagtcacaggctctgataaggattcagctgttgtataaataaagcatgcagcctagcaggaaccatgttaatctctcttggttgtttccttggaatactcctaagcacattaggtttttagatctgtagaaaagatcaaaggatcttcttgagatcctttttttctgcgcgtaatctgctgcttgcaaacaaaaaaaccaccgctaccagcggtggtttgtttgccggatcaagagctaccaactctttttccgaaggtaactggcttcagcagagcgcagataccaaatactgtccttctagtgtagccgtagttaggccaccacttcaagaactctgtagcaccgcctacatacctcgctctgctaatcctgttaccagtggctgctgccagtggcgataagtcgtgtcttaccgggttggactcaagacgatagttaccggataaggcgcagcggtcgggctgaacggggggttcgtgcacacagcccagcttggagcgaacgacctacaccgaactgagatacctacagcgtgagctatgagaaagcgccacgcttcccgaagggagaaaggcggacaggtatccggtaagcggcagggtcggaacaggagagcgcacgagggagcttccagggggaaacgcctggtatctttatagtcctgtcgggtttcgccacctctgacttgagcgtcgatttttgtgatgctcgtcaggggggcggagcctatggaaaaacgccagcaacgcggcctttttacgg

SEQ ID NO: 650 - DNA, 6874 bp, Artificial Sequence
  pCzRRVp14-I-T-dSV
ttcctattaatagtaatcaattacggggtcattagttcatagcccatatatggagttccgcgttacataacttacggtaaatggcccgcctggctgaccgcccaacgacccccgcccattgacgtcaataatgacgtatgttcccatagtaacgccaatagggactttccattgacgtcaatgggtggagtatttacggtaaactgcccacttggcagtacatcaagtgtatcatatgccaagtacgccccctattgacgtcaatgacggtaaatggcccgcctggcattatgcccagtacatgaccttatgggactttcctacttggcagtacatctacgtattagtcatcgctattaccatggtgatgcggttttggcagtacatcaatgggcgtggatagcggtttgactcacggggatttccaagtctccaccccattgacgtcaatgggagtttgttttggcaccaaaatcaacgggactttccaaaatgtcgtaacaactccgccccattgacgcaaatgggcggtaggcgtgtacggtgggaggtctatataagcagagctggtttagtgaaccgtcagatccgctagctagaccatgggatctgggccatctaattttgttaatcatgcacctggggaagccattgtgactgggctggagaagggagcagataaagttgctgggaccatcagccacactatttgggaggtcattgcaggcttggtggctcttttgaccttcctggcatttggcttctggctgttcaagtacctgcagaagaggagagaaagaaggagacagctcacagaattccagaagaggtatctgagaaattcctacagattgtcagaaattcaaaggccaatttctcagcatgagtatgaagacccctatgagcctccatccagaaggaaacctccccctccaccttactccacttatgtgaatattgacaatgtatctgccatataaggatccgcccctctccctcccccccccctaacgttactggccgaagccgcttggaataaggccggtgtgcgtttgtctatatgttattttccaccatattgccgtcttttggcaatgtgagggcccggaaacctggccctgtcttcttgacgagcattcctaggggtctttcccctctcgccaaaggaatgcaaggtctgttgaatgtcgtgaaggaagcagttcctctggaagcttcttgaagacaaacaacgtctgtagcgaccctttgcaggcagcggaaccccccacctggcgacaggtgcctctgcggccaaaagccacgtgtataagatacacctgcaaaggcggcacaaccccagtgccacgttgtgagttggatagttgtggaaagagtcaaatggctctcctcaagcgtattcaacaaggggctgaaggatgcccagaaggtaccccattgtatgggatctgatctggggcctcggtgcacatgctttacatgtgtttagtcgaggttaaaaaaacgtctaggccccccgaaccacggggacgtggttttcctttgaaaaacacgatgataatatggccacaaccatggacaaagtgctgaatagggaggaaagtctgcaactgatggatctgttgggacttgagaggtctgcatggggtaatatcccacttatgaggaaagcatacctgaagaagtgtaaagagttccatcctgacaaaggtggagatgaagagaagatgaaaaagatgaacacactgtataagaaaatggaagatggtgtaaagtatgctcaccagccagattttggaggtttttgggatgccacagagatacctacttatggtacagatgagtgggaacagtggtggaatgcatttaatgaagagaatttgttttgctctgaggaaatgcctagttctgatgatgaggccacagctgactcccagcacagtactccacccaagaaaaagagaaaagtggaagacccaaaggatttcccctctgaactcttgtccttcttgtctcatgcagtgttctcaaataggaccctggcttgctttgctatctacactactaaggagaaggcagctctcttgtacaagaaaatcatggaaaagtattctgtcacctttatttccaggcacaactcctataatcataatattctctttttcttgacaccccataggcatagggtgagtgcaattaacaactatgctcagaagttgtgtactttctccttcctgatctgtaagggtgtgaataaggagtatctcatgtattcagccctgaccagagacccctttagtgtgattgaagaatccctgcctggtgggctcaaggagcatgatttcaacccagaagaggctgaagaaacaaaacaggtgagctggaagcttgtgactgaatatgcaatggagacaaagtgtgatgatgtcctgctcctcctgggaatgtacctggaatttcagtatagctttgaaatgtgtctgaaatgtatcaaaaaggaacagccttctcattataagtatcatgaaaagcactatgccaatgcagctatatttgcagattctaaaaaccagaaaaccatttgtcagcaagctgttgacacagttctggccaagaaaagagtagactctctccagcttaccagggagcagatgttgacaaataggttcaatgaccttctggacagaatggacataatgtttggctcaactggatctgcagatatagaggagtggatggctggagtggcctggctgcactgtctcctccctaaaatggacagtgtagtctatgacttccttaagtgtatggtctataatatccctaaaaagagatactggttgttcaagggacccattgattcagggaaaactacccttgctgctgcacttctggaactctgtggtgggaaagctctcaatgtcaacctgccacttgatagactcaactttgagctgggggtggcaattgatcagtttttggtagtgtttgaagatgtgaaaggtacaggaggagagtccagggatttgcctagtggccaaggcatcaacaatctggacaacctcagagactacctggatgggtctgtaaaggtcaaccttgaaaaaaagcatctcaacaagaggactcaaatatttccacctggaatagtcactatgaatgaatattcagtgcccaagaccctccaggctagatttgtcaagcaaattgatttcagacctaaagattatctgaaacattgtttggagaggagtgagttcctccttgagaaaaggattattcagtcaggaatagcactgcttcttatgctgatatggtatagaccagtggctgagtttgcccaaagcattcagagtagaatagttgagtggaaagaaaggcttgacaaggagttttctctttcagtatatcaaaagatgaagttcaatgtggctatgggtattggagtgcttgattggttgagaaacagtgatgatgatgatgaagattctcaggaaaatgctgataaaaatgaggatgggggagagaagaatatggaagattctggtcatgaaactggcattgatagtcagagccaggggagtttccaggctccacagagctcccaaagtgtccatgaccacaaccagccttaccatatatgcagaggttttacttgtttcaagaaacctcccactccccctccagaacctgaaacatgagcggccgcgactctagatcataatcagccataccacacctccccctgaacctgaaaaatcaatgcaattattgttgaaataaagcacccagcaatgcctgggaccatgtaaaactgtcctggttctttccaaggtatagagcatagcccacaggctgatatttctggccagggttggttggaggacagccttgtctataggaagagaatgaggtttttgcactataagggcatgcaagtcagtcccgcccctaactccacctggttaggaggggaggaggataattaaattgacatatctacctaatttgtgtataataaccctgataaatgcttcaataatattgaaaaaggaagagtcctgtataaaaagaaccagctgtggaatgtgtgtcagttagtaggcttatgcaaagtagcccgcccaagagacaggctgaggcccgcccaccatgatagaacaagatggacttcatgctggatctcctgcagcatgggtggaaagactttttggttatgattgggctcagcagaccattggatgttctgatgctgctgtgttcaggcttagtgcacagggtaggccagtgctctttgtgaagactgatctctctggagctttgaatgaactgcaggatgaggctgctaggctttcatggctggccaccacaggtgtcccttgtgctgcagtgttggatgtggttactgaggctgggagggattggctcctcctgggagaagtgccaggtcaggatctgttgagttctcacctggctccagctgaaaaagtctccataatggcagatgctatgagaaggctgcacacattggacccagctacatgcccatttgaccatcaggccaaacacaggattgagagggccagaacaagaatggaggctgggttggtggaccaggatgaccttgatgaggagcatcagggcctggctccagctgaattgtttgccaggctcaaggctagtatgcctgatggggaggatctggtggtaactcatggtgatgcctgtttgcctaacatcatggtggaaaatggaaggttctctggattcattgattgtggaagactgggtgtagctgacaggtatcaggacatagctcttgcaacaagggatattgcagaggagttgggtggagaatgggctgacaggttcctggtcttgtatggcattgctgccccagacagccaaagaattgctttctataggctgttggatgagtttttctaagctcagcacccacaaagctctcaggtcctaagagacactggcacccatatccatgcatcccttgtataaataaagcatccagcaaagctggtaccatgtaaaactgtcttggttgtttccaaggtatagagcatagctcaataggtttttgactttgtcccgcccctctaagtcctgcacacagatactccaatatgacatacagcatgcttgggaactgagtgcccccatgtgggcagagagcaccatgtgccacagtccctgagaagttcttgggaagggtgggcaattgccatgtgtgcctagagaaggttgtttgtaatactgccaagtgccatgtggtgtgatattggctccatgtgccttgtttgtaataacatttccatgtgtcttgggaagaaccatatataagcagagctggtttagtgaaccctcagataggcctagaccatggccagcagtgagaatgtcataacagagttcatgagattcaaggtgaggatggagggaactgtcaatggtcatgagtttgagattgaaggggaaggggagggcagaccctatgagggccacaacacagtcaaattgaaggtgaccaaagggggaccccttccctttgcctgggacatcctgagcccacagtttcagtatggttccaaagtttatgtaaagcaccctgctgacatccctgactacaagaaactgtccttcccagaaggattcaagtgggaaagggtcatgaactttgaggatggaggggttgcaacagtgacccaggacagttctctccaagatggctgtttcatctacaaggtaaaattcattggtgtgaactttccctctgatggcccagtgatgcaaaaaaagaccatgggctgggaagcctcaacagaaaggctgtaccctagagatggagttctcaagggtgagacccacaaagctctaaagctcaaagatgggggccactatctggtggagttcaagagcatctacatggcaaaaaagccagtgcagttgcctggctattactatgtggatgccaagcttgacataacctcacacaatgaagactacactattgtggaacagtatgagaggactgagggaagacatcatctgtttctgtgaattcgcactgcatggacttacctgcctggtggtatcagtcacaggctctgataaggattcagctgttgtataaataaagcatgcagcctagcaggaaccatgttaatctctcttggttgtttccttggaatactcctaagcacattaggtttttagatctgtagaaaagatcaaaggatcttcttgagatcctttttttctgcgcgtaatctgctgcttgcaaacaaaaaaaccaccgctaccagcggtggtttgtttgccggatcaagagctaccaactctttttccgaaggtaactggcttcagcagagcgcagataccaaatactgtccttctagtgtagccgtagttaggccaccacttcaagaactctgtagcaccgcctacatacctcgctctgctaatcctgttaccagtggctgctgccagtggcgataagtcgtgtcttaccgggttggactcaagacgatagttaccggataaggcgcagcggtcgggctgaacggggggttcgtgcacacagcccagcttggagcgaacgacctacaccgaactgagatacctacagcgtgagctatgagaaagcgccacgcttcccgaagggagaaaggcggacaggtatccggtaagcggcagggtcggaacaggagagcgcacgagggagcttccagggggaaacgcctggtatctttatagtcctgtcgggtttcgccacctctgacttgagcgtcgatttttgtgatgctcgtcaggggggcggagcctatggaaaaacgccagcaacgcggcctttttacgg

SEQ ID NO: 651 - DNA, 7046 bp, Artificial Sequence
  pCzBRVp15-I-T-BB3
ttcctattaatagtaatcaattacggggtcattagttcatagcccatatatggagttccgcgttacataacttacggtaaatggcccgcctggctgaccgcccaacgacccccgcccattgacgtcaataatgacgtatgttcccatagtaacgccaatagggactttccattgacgtcaatgggtggagtatttacggtaaactgcccacttggcagtacatcaagtgtatcatatgccaagtacgccccctattgacgtcaatgacggtaaatggcccgcctggcattatgcccagtacatgaccttatgggactttcctacttggcagtacatctacgtattagtcatcgctattaccatggtgatgcggttttggcagtacatcaatgggcgtggatagcggtttgactcacggggatttccaagtctccaccccattgacgtcaatgggagtttgttttggcaccaaaatcaacgggactttccaaaatgtcgtaacaactccgccccattgacgcaaatgggcggtaggcgtgtacggtgggaggtctatataagcagagctggtttagtgaaccgtcagatccgctagctagaccatgggtcaaagacattcaatagttcaaccaccagctccaccgccaaatgcttttgttgaaattgtgagcagttctactggcattataatcgctgttggcatatttgcatttatattctcatttttatataagttgctgcagtggtacaatcgtaagtcaaagaataagaaacgtaaagagcaaattagagaacaaattgagcttggtttattatcatatggtgctggagtagcatcacttcctttgctcaacgttattgcacataatcctggatcagttatctcggctacccctatctataaaggtccgtgcactggtgtacctaattcgcgcctacttcaaatcacgagcgggactgcagaagagaacactagaattttgaatcatgatggaagaaacccagatggaagtatcaacgtttgaggatccgcccctctccctcccccccccctaacgttactggccgaagccgcttggaataaggccggtgtgcgtttgtctatatgttattttccaccatattgccgtcttttggcaatgtgagggcccggaaacctggccctgtcttcttgacgagcattcctaggggtctttcccctctcgccaaaggaatgcaaggtctgttgaatgtcgtgaaggaagcagttcctctggaagcttcttgaagacaaacaacgtctgtagcgaccctttgcaggcagcggaaccccccacctggcgacaggtgcctctgcggccaaaagccacgtgtataagatacacctgcaaaggcggcacaaccccagtgccacgttgtgagttggatagttgtggaaagagtcaaatggctctcctcaagcgtattcaacaaggggctgaaggatgcccagaaggtaccccattgtatgggatctgatctggggcctcggtgcacatgctttacatgtgtttagtcgaggttaaaaaaacgtctaggccccccgaaccacggggacgtggttttcctttgaaaaacacgatgataatatggccacaaccatggacaaagtgctgaatagggaggaaagtctgcaactgatggatctgttgggacttgagaggtctgcatggggtaatatcccacttatgaggaaagcatacctgaagaagtgtaaagagttccatcctgacaaaggtggagatgaagagaagatgaaaaagatgaacacactgtataagaaaatggaagatggtgtaaagtatgctcaccagccagattttggaggtttttgggatgccacagagatacctacttatggtacagatgagtgggaacagtggtggaatgcatttaatgaagagaatttgttttgctctgaggaaatgcctagttctgatgatgaggccacagctgactcccagcacagtactccacccaagaaaaagagaaaagtggaagacccaaaggatttcccctctgaactcttgtccttcttgtctcatgcagtgttctcaaataggaccctggcttgctttgctatctacactactaaggagaaggcagctctcttgtacaagaaaatcatggaaaagtattctgtcacctttatttccaggcacaactcctataatcataatattctctttttcttgacaccccataggcatagggtgagtgcaattaacaactatgctcagaagttgtgtactttctccttcctgatctgtaagggtgtgaataaggagtatctcatgtattcagccctgaccagagacccctttagtgtgattgaagaatccctgcctggtgggctcaaggagcatgatttcaacccagaagaggctgaagaaacaaaacaggtgagctggaagcttgtgactgaatatgcaatggagacaaagtgtgatgatgtcctgctcctcctgggaatgtacctggaatttcagtatagctttgaaatgtgtctgaaatgtatcaaaaaggaacagccttctcattataagtatcatgaaaagcactatgccaatgcagctatatttgcagattctaaaaaccagaaaaccatttgtcagcaagctgttgacacagttctggccaagaaaagagtagactctctccagcttaccagggagcagatgttgacaaataggttcaatgaccttctggacagaatggacataatgtttggctcaactggatctgcagatatagaggagtggatggctggagtggcctggctgcactgtctcctccctaaaatggacagtgtagtctatgacttccttaagtgtatggtctataatatccctaaaaagagatactggttgttcaagggacccattgattcagggaaaactacccttgctgctgcacttctggaactctgtggtgggaaagctctcaatgtcaacctgccacttgatagactcaactttgagctgggggtggcaattgatcagtttttggtagtgtttgaagatgtgaaaggtacaggaggagagtccagggatttgcctagtggccaaggcatcaacaatctggacaacctcagagactacctggatgggtctgtaaaggtcaaccttgaaaaaaagcatctcaacaagaggactcaaatatttccacctggaatagtcactatgaatgaatattcagtgcccaagaccctccaggctagatttgtcaagcaaattgatttcagacctaaagattatctgaaacattgtttggagaggagtgagttcctccttgagaaaaggattattcagtcaggaatagcactgcttcttatgctgatatggtatagaccagtggctgagtttgcccaaagcattcagagtagaatagttgagtggaaagaaaggcttgacaaggagttttctctttcagtatatcaaaagatgaagttcaatgtggctatgggtattggagtgcttgattggttgagaaacagtgatgatgatgatgaagattctcaggaaaatgctgataaaaatgaggatgggggagagaagaatatggaagattctggtcatgaaactggcattgatagtcagagccaggggagtttccaggctccacagagctcccaaagtgtccatgaccacaaccagccttaccatatatgcagaggttttacttgtttcaagaaacctcccactccccctccagaacctgaaacatgagcggccgcgactctagatcataatcagccataccacacctccccctgaacctgaaaaatcaatgcaattattgttgaaataaagcacccagcaatgcctgggaccatgtaaaactgtcctggttctttccaaggtatagagcatagcccacaggctgatatttctggccagggttggttggaggacagccttgtctataggaagagaatgaggtttttgcactataagggcatgcaagtcagtcccgcccctaactccacctggttgcccatcccgcccctaactccgcccagttccgcccattctccgccccatggctgactaattttttttatttatgcagaggcggaggccgcctcggcctctgagctattccagaagtagtgaggaggcttttttggaggcccttaattaaattgacatatctacctaatttgtgtataataaccctgataaatgcttcaataatattgaaaaaggaagagtcctgtataaaaagaaccagctgtggaatgtgtgtcagttagtaggcttatgcaaagtagcccgcccaagagacaggctgaggcccgcccaccatgatagaacaagatggacttcatgctggatctcctgcagcatgggtggaaagactttttggttatgattgggctcagcagaccattggatgttctgatgctgctgtgttcaggcttagtgcacagggtaggccagtgctctttgtgaagactgatctctctggagctttgaatgaactgcaggatgaggctgctaggctttcatggctggccaccacaggtgtcccttgtgctgcagtgttggatgtggttactgaggctgggagggattggctcctcctgggagaagtgccaggtcaggatctgttgagttctcacctggctccagctgaaaaagtctccataatggcagatgctatgagaaggctgcacacattggacccagctacatgcccatttgaccatcaggccaaacacaggattgagagggccagaacaagaatggaggctgggttggtggaccaggatgaccttgatgaggagcatcagggcctggctccagctgaattgtttgccaggctcaaggctagtatgcctgatggggaggatctggtggtaactcatggtgatgcctgtttgcctaacatcatggtggaaaatggaaggttctctggattcattgattgtggaagactgggtgtagctgacaggtatcaggacatagctcttgcaacaagggatattgcagaggagttgggtggagaatgggctgacaggttcctggtcttgtatggcattgctgccccagacagccaaagaattgctttctataggctgttggatgagtttttctaagctcagcacccacaaagctctcaggtcctaagagacactggcacccatatccatgcatcccttgtataaataaagcatccagcaaagctggtaccatgtaaaactgtcttggttgtttccaaggtatagagcatagctcaataggtttttgactttgtcccgcccctctaagtcctgcacacagatactccaatatgacatacagcatgcttgggaactgagtgcccccatgtgggcagagagcaccatgtgccacagtccctgagaagttcttgggaagggtgggcaattgccatgtgtgcctagagaaggttgtttgtaatactgccaagtgccatgtggtgtgatattggctccatgtgccttgtttgtaataacatttccatgtgtcttgggaagaaccatatataagcagagctggtttagtgaaccctcagataggcctagaccatggccagcagtgagaatgtcataacagagttcatgagattcaaggtgaggatggagggaactgtcaatggtcatgagtttgagattgaaggggaaggggagggcagaccctatgagggccacaacacagtcaaattgaaggtgaccaaagggggaccccttccctttgcctgggacatcctgagcccacagtttcagtatggttccaaagtttatgtaaagcaccctgctgacatccctgactacaagaaactgtccttcccagaaggattcaagtgggaaagggtcatgaactttgaggatggaggggttgcaacagtgacccaggacagttctctccaagatggctgtttcatctacaaggtaaaattcattggtgtgaactttccctctgatggcccagtgatgcaaaaaaagaccatgggctgggaagcctcaacagaaaggctgtaccctagagatggagttctcaagggtgagacccacaaagctctaaagctcaaagatgggggccactatctggtggagttcaagagcatctacatggcaaaaaagccagtgcagttgcctggctattactatgtggatgccaagcttgacataacctcacacaatgaagactacactattgtggaacagtatgagaggactgagggaagacatcatctgtttctgtgaattcgcactgcatggacttacctgcctggtggtatcagtcacaggctctgataaggattcagctgttgtataaataaagcatgcagcctagcaggaaccatgttaatctctcttggttgtttccttggaatactcctaagcacattaggtttttagatctgtagaaaagatcaaaggatcttcttgagatcctttttttctgcgcgtaatctgctgcttgcaaacaaaaaaaccaccgctaccagcggtggtttgtttgccggatcaagagctaccaactctttttccgaaggtaactggcttcagcagagcgcagataccaaatactgtccttctagtgtagccgtagttaggccaccacttcaagaactctgtagcaccgcctacatacctcgctctgctaatcctgttaccagtggctgctgccagtggcgataagtcgtgtcttaccgggttggactcaagacgatagttaccggataaggcgcagcggtcgggctgaacggggggttcgtgcacacagcccagcttggagcgaacgacctacaccgaactgagatacctacagcgtgagctatgagaaagcgccacgcttcccgaagggagaaaggcggacaggtatccggtaagcggcagggtcggaacaggagagcgcacgagggagcttccagggggaaacgcctggtatctttatagtcctgtcgggtttcgccacctctgacttgagcgtcgatttttgtgatgctcgtcaggggggcggagcctatggaaaaacgccagcaacgcggcctttttacgg

SEQ ID NO: 652 - DNA, 6919 bp, Artificial Sequence
  pCzBRVp15-I-T-dSV
ttcctattaatagtaatcaattacggggtcattagttcatagcccatatatggagttccgcgttacataacttacggtaaatggcccgcctggctgaccgcccaacgacccccgcccattgacgtcaataatgacgtatgttcccatagtaacgccaatagggactttccattgacgtcaatgggtggagtatttacggtaaactgcccacttggcagtacatcaagtgtatcatatgccaagtacgccccctattgacgtcaatgacggtaaatggcccgcctggcattatgcccagtacatgaccttatgggactttcctacttggcagtacatctacgtattagtcatcgctattaccatggtgatgcggttttggcagtacatcaatgggcgtggatagcggtttgactcacggggatttccaagtctccaccccattgacgtcaatgggagtttgttttggcaccaaaatcaacgggactttccaaaatgtcgtaacaactccgccccattgacgcaaatgggcggtaggcgtgtacggtgggaggtctatataagcagagctggtttagtgaaccgtcagatccgctagctagaccatgggtcaaagacattcaatagttcaaccaccagctccaccgccaaatgcttttgttgaaattgtgagcagttctactggcattataatcgctgttggcatatttgcatttatattctcatttttatataagttgctgcagtggtacaatcgtaagtcaaagaataagaaacgtaaagagcaaattagagaacaaattgagcttggtttattatcatatggtgctggagtagcatcacttcctttgctcaacgttattgcacataatcctggatcagttatctcggctacccctatctataaaggtccgtgcactggtgtacctaattcgcgcctacttcaaatcacgagcgggactgcagaagagaacactagaattttgaatcatgatggaagaaacccagatggaagtatcaacgtttgaggatccgcccctctccctcccccccccctaacgttactggccgaagccgcttggaataaggccggtgtgcgtttgtctatatgttattttccaccatattgccgtcttttggcaatgtgagggcccggaaacctggccctgtcttcttgacgagcattcctaggggtctttcccctctcgccaaaggaatgcaaggtctgttgaatgtcgtgaaggaagcagttcctctggaagcttcttgaagacaaacaacgtctgtagcgaccctttgcaggcagcggaaccccccacctggcgacaggtgcctctgcggccaaaagccacgtgtataagatacacctgcaaaggcggcacaaccccagtgccacgttgtgagttggatagttgtggaaagagtcaaatggctctcctcaagcgtattcaacaaggggctgaaggatgcccagaaggtaccccattgtatgggatctgatctggggcctcggtgcacatgctttacatgtgtttagtcgaggttaaaaaaacgtctaggccccccgaaccacggggacgtggttttcctttgaaaaacacgatgataatatggccacaaccatggacaaagtgctgaatagggaggaaagtctgcaactgatggatctgttgggacttgagaggtctgcatggggtaatatcccacttatgaggaaagcatacctgaagaagtgtaaagagttccatcctgacaaaggtggagatgaagagaagatgaaaaagatgaacacactgtataagaaaatggaagatggtgtaaagtatgctcaccagccagattttggaggtttttgggatgccacagagatacctacttatggtacagatgagtgggaacagtggtggaatgcatttaatgaagagaatttgttttgctctgaggaaatgcctagttctgatgatgaggccacagctgactcccagcacagtactccacccaagaaaaagagaaaagtggaagacccaaaggatttcccctctgaactcttgtccttcttgtctcatgcagtgttctcaaataggaccctggcttgctttgctatctacactactaaggagaaggcagctctcttgtacaagaaaatcatggaaaagtattctgtcacctttatttccaggcacaactcctataatcataatattctctttttcttgacaccccataggcatagggtgagtgcaattaacaactatgctcagaagttgtgtactttctccttcctgatctgtaagggtgtgaataaggagtatctcatgtattcagccctgaccagagacccctttagtgtgattgaagaatccctgcctggtgggctcaaggagcatgatttcaacccagaagaggctgaagaaacaaaacaggtgagctggaagcttgtgactgaatatgcaatggagacaaagtgtgatgatgtcctgctcctcctgggaatgtacctggaatttcagtatagctttgaaatgtgtctgaaatgtatcaaaaaggaacagccttctcattataagtatcatgaaaagcactatgccaatgcagctatatttgcagattctaaaaaccagaaaaccatttgtcagcaagctgttgacacagttctggccaagaaaagagtagactctctccagcttaccagggagcagatgttgacaaataggttcaatgaccttctggacagaatggacataatgtttggctcaactggatctgcagatatagaggagtggatggctggagtggcctggctgcactgtctcctccctaaaatggacagtgtagtctatgacttccttaagtgtatggtctataatatccctaaaaagagatactggttgttcaagggacccattgattcagggaaaactacccttgctgctgcacttctggaactctgtggtgggaaagctctcaatgtcaacctgccacttgatagactcaactttgagctgggggtggcaattgatcagtttttggtagtgtttgaagatgtgaaaggtacaggaggagagtccagggatttgcctagtggccaaggcatcaacaatctggacaacctcagagactacctggatgggtctgtaaaggtcaaccttgaaaaaaagcatctcaacaagaggactcaaatatttccacctggaatagtcactatgaatgaatattcagtgcccaagaccctccaggctagatttgtcaagcaaattgatttcagacctaaagattatctgaaacattgtttggagaggagtgagttcctccttgagaaaaggattattcagtcaggaatagcactgcttcttatgctgatatggtatagaccagtggctgagtttgcccaaagcattcagagtagaatagttgagtggaaagaaaggcttgacaaggagttttctctttcagtatatcaaaagatgaagttcaatgtggctatgggtattggagtgcttgattggttgagaaacagtgatgatgatgatgaagattctcaggaaaatgctgataaaaatgaggatgggggagagaagaatatggaagattctggtcatgaaactggcattgatagtcagagccaggggagtttccaggctccacagagctcccaaagtgtccatgaccacaaccagccttaccatatatgcagaggttttacttgtttcaagaaacctcccactccccctccagaacctgaaacatgagcggccgcgactctagatcataatcagccataccacacctccccctgaacctgaaaaatcaatgcaattattgttgaaataaagcacccagcaatgcctgggaccatgtaaaactgtcctggttctttccaaggtatagagcatagcccacaggctgatatttctggccagggttggttggaggacagccttgtctataggaagagaatgaggtttttgcactataagggcatgcaagtcagtcccgcccctaactccacctggttaggaggggaggaggattaataaattgacatatctacctaatttgtgtataataaccctgataaatgcttcaataatattgaaaaaggaagagtcctgtataaaaagaaccagctgtggaatgtgtgtcagttagtaggcttatgcaaagtagcccgcccaagagacaggctgaggcccgcccaccatgatagaacaagatggacttcatgctggatctcctgcagcatgggtggaaagactttttggttatgattgggctcagcagaccattggatgttctgatgctgctgtgttcaggcttagtgcacagggtaggccagtgctctttgtgaagactgatctctctggagctttgaatgaactgcaggatgaggctgctaggctttcatggctggccaccacaggtgtcccttgtgctgcagtgttggatgtggttactgaggctgggagggattggctcctcctgggagaagtgccaggtcaggatctgttgagttctcacctggctccagctgaaaaagtctccataatggcagatgctatgagaaggctgcacacattggacccagctacatgcccatttgaccatcaggccaaacacaggattgagagggccagaacaagaatggaggctgggttggtggaccaggatgaccttgatgaggagcatcagggcctggctccagctgaattgtttgccaggctcaaggctagtatgcctgatggggaggatctggtggtaactcatggtgatgcctgtttgcctaacatcatggtggaaaatggaaggttctctggattcattgattgtggaagactgggtgtagctgacaggtatcaggacatagctcttgcaacaagggatattgcagaggagttgggtggagaatgggctgacaggttcctggtcttgtatggcattgctgccccagacagccaaagaattgctttctataggctgttggatgagtttttctaagctcagcacccacaaagctctcaggtcctaagagacactggcacccatatccatgcatcccttgtataaataaagcatccagcaaagctggtaccatgtaaaactgtcttggttgtttccaaggtatagagcatagctcaataggtttttgactttgtcccgcccctctaagtcctgcacacagatactccaatatgacatacagcatgcttgggaactgagtgcccccatgtgggcagagagcaccatgtgccacagtccctgagaagttcttgggaagggtgggcaattgccatgtgtgcctagagaaggttgtttgtaatactgccaagtgccatgtggtgtgatattggctccatgtgccttgtttgtaataacatttccatgtgtcttgggaagaaccatatataagcagagctggtttagtgaaccctcagataggcctagaccatggccagcagtgagaatgtcataacagagttcatgagattcaaggtgaggatggagggaactgtcaatggtcatgagtttgagattgaaggggaaggggagggcagaccctatgagggccacaacacagtcaaattgaaggtgaccaaagggggaccccttccctttgcctgggacatcctgagcccacagtttcagtatggttccaaagtttatgtaaagcaccctgctgacatccctgactacaagaaactgtccttcccagaaggattcaagtgggaaagggtcatgaactttgaggatggaggggttgcaacagtgacccaggacagttctctccaagatggctgtttcatctacaaggtaaaattcattggtgtgaactttccctctgatggcccagtgatgcaaaaaaagaccatgggctgggaagcctcaacagaaaggctgtaccctagagatggagttctcaagggtgagacccacaaagctctaaagctcaaagatgggggccactatctggtggagttcaagagcatctacatggcaaaaaagccagtgcagttgcctggctattactatgtggatgccaagcttgacataacctcacacaatgaagactacactattgtggaacagtatgagaggactgagggaagacatcatctgtttctgtgaattcgcactgcatggacttacctgcctggtggtatcagtcacaggctctgataaggattcagctgttgtataaataaagcatgcagcctagcaggaaccatgttaatctctcttggttgtttccttggaatactcctaagcacattaggtttttagatctgtagaaaagatcaaaggatcttcttgagatcctttttttctgcgcgtaatctgctgcttgcaaacaaaaaaaccaccgctaccagcggtggtttgtttgccggatcaagagctaccaactctttttccgaaggtaactggcttcagcagagcgcagataccaaatactgtccttctagtgtagccgtagttaggccaccacttcaagaactctgtagcaccgcctacatacctcgctctgctaatcctgttaccagtggctgctgccagtggcgataagtcgtgtcttaccgggttggactcaagacgatagttaccggataaggcgcagcggtcgggctgaacggggggttcgtgcacacagcccagcttggagcgaacgacctacaccgaactgagatacctacagcgtgagctatgagaaagcgccacgcttcccgaagggagaaaggcggacaggtatccggtaagcggcagggtcggaacaggagagcgcacgagggagcttccagggggaaacgcctggtatctttatagtcctgtcgggtttcgccacctctgacttgagcgtcgatttttgtgatgctcgtcaggggggcggagcctatggaaaaacgccagcaacgcggcctttttacgg

SEQ ID NO: 653 - DNA, 8624 bp, Artificial Sequence
  pCzGALV-I-T-BB3
ttcctattaatagtaatcaattacggggtcattagttcatagcccatatatggagttccgcgttacataacttacggtaaatggcccgcctggctgaccgcccaacgacccccgcccattgacgtcaataatgacgtatgttcccatagtaacgccaatagggactttccattgacgtcaatgggtggagtatttacggtaaactgcccacttggcagtacatcaagtgtatcatatgccaagtacgccccctattgacgtcaatgacggtaaatggcccgcctggcattatgcccagtacatgaccttatgggactttcctacttggcagtacatctacgtattagtcatcgctattaccatggtgatgcggttttggcagtacatcaatgggcgtggatagcggtttgactcacggggatttccaagtctccaccccattgacgtcaatgggagtttgttttggcaccaaaatcaacgggactttccaaaatgtcgtaacaactccgccccattgacgcaaatgggcggtaggcgtgtacggtgggaggtctatataagcagagctggtttagtgaaccgtcagatccgctagcaccatggtcctgctgccaggctcaatgctgctgaccagcaatctccaccacctgagacaccagatgtcacctgggtcctggaagagacttatcattcttctgtcctgtgtgtttgggggtggaggcaccagcctgcaaaataagaacccacatcagcccatgaccctcacctggcaggtcctgagccagacaggtgatgttgtctgggataccaaagcagtccagcccccctggacttggtggcccaccttgaaacctgatgtctgtgccctggcagctagtctggagagctgggacatcccaggcactgatgtcagcagcagcaagagggttaggccacctgacagtgactacactgcagcctacaagcagatcacctggggagccattggctgctcctaccctagagctagaaccagaatggcctccagtaccttctatgtctgccctagagatggcagaactctgtctgaggccaggagatgtggtggactggaatccctctactgcaaagagtgggactgtgagactactggcacaggctattggttgtccaagtcatccaaggacttgatcactgtgaagtgggatcagaattcagagtggacccagaaatttcagcaatgccaccagacaggctggtgcaaccccttgaagattgactttacagataaggggaagctcagtaaagactggatcacaggcaaaacctggggactgaggttctatgtttctggccatccaggtgttcagttcaccatcagattgaaaatcaccaatatgccagctgtggcagtgggtcctgaccttgtgctggtggaacagggcccacccaggacatccttggccttgcctccacccctccctcccagggaagccccccctccaagcttgcctgactccaattctacagctctggctactagtgcccaaactcctactgtgaggaagaccattgtcacactcaatacaccccctccaactacaggagacaggttgtttgaccttgtgcaaggtgccttccttacacttaatgccaccaaccctggagccacagaaagttgttggctgtgcctggcaatgggtccaccctactatgaggcaattgcaagttctggtgaagtggcatatagcactgacctggatagatgtaggtgggggacccagggaaaactcacacttactgaagtgagtgggcatggcctgtgcattggaaaagtcccattcacacaccaacatctgtgcaaccaaacactctccatcaactcttctggtgaccaccagtacctgcttccaagcaaccacagctggtgggcctgcagcactgggctgaccccctgcctgagcacctctgtgttcaatcagacaagagatttctgtatccaggtgcagctcattcccagaatctactactatcctgaggaggtgctgctgcaagcctatgacaacagtcatcccaggactaagagggaagcagtgagtctcaccctggctgttctgctgggcctgggaatcacagctgggattggtacaggctcaacagcccttatcaagggccccattgacctgcagcaaggactgacttcccttcagattgcaattgatgctgatctgagagccctgcaggattctgtgtccaaactggaggacagccttacctctctctcagaagtggttcttcagaacaggagaggactggacttgctctttctcaaagagggagggctttgtgctgccctcaaggaggagtgttgcttttacattgatcattctggggctgttagagattcaatgaaaaagctcaaggagaaattggataaaaggcagctggaaagacagaagtctcaaaactggtatgaagggtggttcaacaatagtccttggttcactaccttgctgagcactattgctggcccactcttgctgctgttgctcctgctcatcctggggccctgtatcatcaacaagctggtgcagtttatcaatgacaggatcagtgcctgctgaggatccgcccctctccctcccccccccctaacgttactggccgaagccgcttggaataaggccggtgtgcgtttgtctatatgttattttccaccatattgccgtcttttggcaatgtgagggcccggaaacctggccctgtcttcttgacgagcattcctaggggtctttcccctctcgccaaaggaatgcaaggtctgttgaatgtcgtgaaggaagcagttcctctggaagcttcttgaagacaaacaacgtctgtagcgaccctttgcaggcagcggaaccccccacctggcgacaggtgcctctgcggccaaaagccacgtgtataagatacacctgcaaaggcggcacaaccccagtgccacgttgtgagttggatagttgtggaaagagtcaaatggctctcctcaagcgtattcaacaaggggctgaaggatgcccagaaggtaccccattgtatgggatctgatctggggcctcggtgcacatgctttacatgtgtttagtcgaggttaaaaaaacgtctaggccccccgaaccacggggacgtggttttcctttgaaaaacacgatgataatatggccacaaccatggacaaagtgctgaatagggaggaaagtctgcaactgatggatctgttgggacttgagaggtctgcatggggtaatatcccacttatgaggaaagcatacctgaagaagtgtaaagagttccatcctgacaaaggtggagatgaagagaagatgaaaaagatgaacacactgtataagaaaatggaagatggtgtaaagtatgctcaccagccagattttggaggtttttgggatgccacagagatacctacttatggtacagatgagtgggaacagtggtggaatgcatttaatgaagagaatttgttttgctctgaggaaatgcctagttctgatgatgaggccacagctgactcccagcacagtactccacccaagaaaaagagaaaagtggaagacccaaaggatttcccctctgaactcttgtccttcttgtctcatgcagtgttctcaaataggaccctggcttgctttgctatctacactactaaggagaaggcagctctcttgtacaagaaaatcatggaaaagtattctgtcacctttatttccaggcacaactcctataatcataatattctctttttcttgacaccccataggcatagggtgagtgcaattaacaactatgctcagaagttgtgtactttctccttcctgatctgtaagggtgtgaataaggagtatctcatgtattcagccctgaccagagacccctttagtgtgattgaagaatccctgcctggtgggctcaaggagcatgatttcaacccagaagaggctgaagaaacaaaacaggtgagctggaagcttgtgactgaatatgcaatggagacaaagtgtgatgatgtcctgctcctcctgggaatgtacctggaatttcagtatagctttgaaatgtgtctgaaatgtatcaaaaaggaacagccttctcattataagtatcatgaaaagcactatgccaatgcagctatatttgcagattctaaaaaccagaaaaccatttgtcagcaagctgttgacacagttctggccaagaaaagagtagactctctccagcttaccagggagcagatgttgacaaataggttcaatgaccttctggacagaatggacataatgtttggctcaactggatctgcagatatagaggagtggatggctggagtggcctggctgcactgtctcctccctaaaatggacagtgtagtctatgacttccttaagtgtatggtctataatatccctaaaaagagatactggttgttcaagggacccattgattcagggaaaactacccttgctgctgcacttctggaactctgtggtgggaaagctctcaatgtcaacctgccacttgatagactcaactttgagctgggggtggcaattgatcagtttttggtagtgtttgaagatgtgaaaggtacaggaggagagtccagggatttgcctagtggccaaggcatcaacaatctggacaacctcagagactacctggatgggtctgtaaaggtcaaccttgaaaaaaagcatctcaacaagaggactcaaatatttccacctggaatagtcactatgaatgaatattcagtgcccaagaccctccaggctagatttgtcaagcaaattgatttcagacctaaagattatctgaaacattgtttggagaggagtgagttcctccttgagaaaaggattattcagtcaggaatagcactgcttcttatgctgatatggtatagaccagtggctgagtttgcccaaagcattcagagtagaatagttgagtggaaagaaaggcttgacaaggagttttctctttcagtatatcaaaagatgaagttcaatgtggctatgggtattggagtgcttgattggttgagaaacagtgatgatgatgatgaagattctcaggaaaatgctgataaaaatgaggatgggggagagaagaatatggaagattctggtcatgaaactggcattgatagtcagagccaggggagtttccaggctccacagagctcccaaagtgtccatgaccacaaccagccttaccatatatgcagaggttttacttgtttcaagaaacctcccactccccctccagaacctgaaacatgagcggccgcgactctagatcataatcagccataccacacctccccctgaacctgaaaaatcaatgcaattattgttgaaataaagcacccagcaatgcctgggaccatgtaaaactgtcctggttctttccaaggtatagagcatagcccacaggctgatatttctggccagggttggttggaggacagccttgtctataggaagagaatgaggtttttgcactataagggcatgcaagtcagtcccgcccctaactccacctggttgcccatcccgcccctaactccgcccagttccgcccattctccgccccatggctgactaattttttttatttatgcagaggcggaggccgcctcggcctctgagctattccagaagtagtgaggaggcttttttggaggcccttaattaaattgacatatctacctaatttgtgtataataaccctgataaatgcttcaataatattgaaaaaggaagagtcctgtataaaaagaaccagctgtggaatgtgtgtcagttagtaggcttatgcaaagtagcccgcccaagagacaggctgaggcccgcccaccatgatagaacaagatggacttcatgctggatctcctgcagcatgggtggaaagactttttggttatgattgggctcagcagaccattggatgttctgatgctgctgtgttcaggcttagtgcacagggtaggccagtgctctttgtgaagactgatctctctggagctttgaatgaactgcaggatgaggctgctaggctttcatggctggccaccacaggtgtcccttgtgctgcagtgttggatgtggttactgaggctgggagggattggctcctcctgggagaagtgccaggtcaggatctgttgagttctcacctggctccagctgaaaaagtctccataatggcagatgctatgagaaggctgcacacattggacccagctacatgcccatttgaccatcaggccaaacacaggattgagagggccagaacaagaatggaggctgggttggtggaccaggatgaccttgatgaggagcatcagggcctggctccagctgaattgtttgccaggctcaaggctagtatgcctgatggggaggatctggtggtaactcatggtgatgcctgtttgcctaacatcatggtggaaaatggaaggttctctggattcattgattgtggaagactgggtgtagctgacaggtatcaggacatagctcttgcaacaagggatattgcagaggagttgggtggagaatgggctgacaggttcctggtcttgtatggcattgctgccccagacagccaaagaattgctttctataggctgttggatgagtttttctaagctcagcacccacaaagctctcaggtcctaagagacactggcacccatatccatgcatcccttgtataaataaagcatccagcaaagctggtaccatgtaaaactgtcttggttgtttccaaggtatagagcatagctcaataggtttttgactttgtcccgcccctctaagtcctgcacacagatactccaatatgacatacagcatgcttgggaactgagtgcccccatgtgggcagagagcaccatgtgccacagtccctgagaagttcttgggaagggtgggcaattgccatgtgtgcctagagaaggttgtttgtaatactgccaagtgccatgtggtgtgatattggctccatgtgccttgtttgtaataacatttccatgtgtcttgggaagaaccatatataagcagagctggtttagtgaaccctcagataggcctagaccatggccagcagtgagaatgtcataacagagttcatgagattcaaggtgaggatggagggaactgtcaatggtcatgagtttgagattgaaggggaaggggagggcagaccctatgagggccacaacacagtcaaattgaaggtgaccaaagggggaccccttccctttgcctgggacatcctgagcccacagtttcagtatggttccaaagtttatgtaaagcaccctgctgacatccctgactacaagaaactgtccttcccagaaggattcaagtgggaaagggtcatgaactttgaggatggaggggttgcaacagtgacccaggacagttctctccaagatggctgtttcatctacaaggtaaaattcattggtgtgaactttccctctgatggcccagtgatgcaaaaaaagaccatgggctgggaagcctcaacagaaaggctgtaccctagagatggagttctcaagggtgagacccacaaagctctaaagctcaaagatgggggccactatctggtggagttcaagagcatctacatggcaaaaaagccagtgcagttgcctggctattactatgtggatgccaagcttgacataacctcacacaatgaagactacactattgtggaacagtatgagaggactgagggaagacatcatctgtttctgtgaattcgcactgcatggacttacctgcctggtggtatcagtcacaggctctgataaggattcagctgttgtataaataaagcatgcagcctagcaggaaccatgttaatctctcttggttgtttccttggaatactcctaagcacattaggtttttagatctgtagaaaagatcaaaggatcttcttgagatcctttttttctgcgcgtaatctgctgcttgcaaacaaaaaaaccaccgctaccagcggtggtttgtttgccggatcaagagctaccaactctttttccgaaggtaactggcttcagcagagcgcagataccaaatactgtccttctagtgtagccgtagttaggccaccacttcaagaactctgtagcaccgcctacatacctcgctctgctaatcctgttaccagtggctgctgccagtggcgataagtcgtgtcttaccgggttggactcaagacgatagttaccggataaggcgcagcggtcgggctgaacggggggttcgtgcacacagcccagcttggagcgaacgacctacaccgaactgagatacctacagcgtgagctatgagaaagcgccacgcttcccgaagggagaaaggcggacaggtatccggtaagcggcagggtcggaacaggagagcgcacgagggagcttccagggggaaacgcctggtatctttatagtcctgtcgggtttcgccacctctgacttgagcgtcgatttttgtgatgctcgtcaggggggcggagcctatggaaaaacgccagcaacgcggcctttttacgg

SEQ ID NO: 654 - DNA, 8497 bp, Artificial Sequence
  pCzGALV-I-T-dSV
ttcctattaatagtaatcaattacggggtcattagttcatagcccatatatggagttccgcgttacataacttacggtaaatggcccgcctggctgaccgcccaacgacccccgcccattgacgtcaataatgacgtatgttcccatagtaacgccaatagggactttccattgacgtcaatgggtggagtatttacggtaaactgcccacttggcagtacatcaagtgtatcatatgccaagtacgccccctattgacgtcaatgacggtaaatggcccgcctggcattatgcccagtacatgaccttatgggactttcctacttggcagtacatctacgtattagtcatcgctattaccatggtgatgcggttttggcagtacatcaatgggcgtggatagcggtttgactcacggggatttccaagtctccaccccattgacgtcaatgggagtttgttttggcaccaaaatcaacgggactttccaaaatgtcgtaacaactccgccccattgacgcaaatgggcggtaggcgtgtacggtgggaggtctatataagcagagctggtttagtgaaccgtcagatccgctagcaccatggtcctgctgccaggctcaatgctgctgaccagcaatctccaccacctgagacaccagatgtcacctgggtcctggaagagacttatcattcttctgtcctgtgtgtttgggggtggaggcaccagcctgcaaaataagaacccacatcagcccatgaccctcacctggcaggtcctgagccagacaggtgatgttgtctgggataccaaagcagtccagcccccctggacttggtggcccaccttgaaacctgatgtctgtgccctggcagctagtctggagagctgggacatcccaggcactgatgtcagcagcagcaagagggttaggccacctgacagtgactacactgcagcctacaagcagatcacctggggagccattggctgctcctaccctagagctagaaccagaatggcctccagtaccttctatgtctgccctagagatggcagaactctgtctgaggccaggagatgtggtggactggaatccctctactgcaaagagtgggactgtgagactactggcacaggctattggttgtccaagtcatccaaggacttgatcactgtgaagtgggatcagaattcagagtggacccagaaatttcagcaatgccaccagacaggctggtgcaaccccttgaagattgactttacagataaggggaagctcagtaaagactggatcacaggcaaaacctggggactgaggttctatgtttctggccatccaggtgttcagttcaccatcagattgaaaatcaccaatatgccagctgtggcagtgggtcctgaccttgtgctggtggaacagggcccacccaggacatccttggccttgcctccacccctccctcccagggaagccccccctccaagcttgcctgactccaattctacagctctggctactagtgcccaaactcctactgtgaggaagaccattgtcacactcaatacaccccctccaactacaggagacaggttgtttgaccttgtgcaaggtgccttccttacacttaatgccaccaaccctggagccacagaaagttgttggctgtgcctggcaatgggtccaccctactatgaggcaattgcaagttctggtgaagtggcatatagcactgacctggatagatgtaggtgggggacccagggaaaactcacacttactgaagtgagtgggcatggcctgtgcattggaaaagtcccattcacacaccaacatctgtgcaaccaaacactctccatcaactcttctggtgaccaccagtacctgcttccaagcaaccacagctggtgggcctgcagcactgggctgaccccctgcctgagcacctctgtgttcaatcagacaagagatttctgtatccaggtgcagctcattcccagaatctactactatcctgaggaggtgctgctgcaagcctatgacaacagtcatcccaggactaagagggaagcagtgagtctcaccctggctgttctgctgggcctgggaatcacagctgggattggtacaggctcaacagcccttatcaagggccccattgacctgcagcaaggactgacttcccttcagattgcaattgatgctgatctgagagccctgcaggattctgtgtccaaactggaggacagccttacctctctctcagaagtggttcttcagaacaggagaggactggacttgctctttctcaaagagggagggctttgtgctgccctcaaggaggagtgttgcttttacattgatcattctggggctgttagagattcaatgaaaaagctcaaggagaaattggataaaaggcagctggaaagacagaagtctcaaaactggtatgaagggtggttcaacaatagtccttggttcactaccttgctgagcactattgctggcccactcttgctgctgttgctcctgctcatcctggggccctgtatcatcaacaagctggtgcagtttatcaatgacaggatcagtgcctgctgaggatccgcccctctccctcccccccccctaacgttactggccgaagccgcttggaataaggccggtgtgcgtttgtctatatgttattttccaccatattgccgtcttttggcaatgtgagggcccggaaacctggccctgtcttcttgacgagcattcctaggggtctttcccctctcgccaaaggaatgcaaggtctgttgaatgtcgtgaaggaagcagttcctctggaagcttcttgaagacaaacaacgtctgtagcgaccctttgcaggcagcggaaccccccacctggcgacaggtgcctctgcggccaaaagccacgtgtataagatacacctgcaaaggcggcacaaccccagtgccacgttgtgagttggatagttgtggaaagagtcaaatggctctcctcaagcgtattcaacaaggggctgaaggatgcccagaaggtaccccattgtatgggatctgatctggggcctcggtgcacatgctttacatgtgtttagtcgaggttaaaaaaacgtctaggccccccgaaccacggggacgtggttttcctttgaaaaacacgatgataatatggccacaaccatggacaaagtgctgaatagggaggaaagtctgcaactgatggatctgttgggacttgagaggtctgcatggggtaatatcccacttatgaggaaagcatacctgaagaagtgtaaagagttccatcctgacaaaggtggagatgaagagaagatgaaaaagatgaacacactgtataagaaaatggaagatggtgtaaagtatgctcaccagccagattttggaggtttttgggatgccacagagatacctacttatggtacagatgagtgggaacagtggtggaatgcatttaatgaagagaatttgttttgctctgaggaaatgcctagttctgatgatgaggccacagctgactcccagcacagtactccacccaagaaaaagagaaaagtggaagacccaaaggatttcccctctgaactcttgtccttcttgtctcatgcagtgttctcaaataggaccctggcttgctttgctatctacactactaaggagaaggcagctctcttgtacaagaaaatcatggaaaagtattctgtcacctttatttccaggcacaactcctataatcataatattctctttttcttgacaccccataggcatagggtgagtgcaattaacaactatgctcagaagttgtgtactttctccttcctgatctgtaagggtgtgaataaggagtatctcatgtattcagccctgaccagagacccctttagtgtgattgaagaatccctgcctggtgggctcaaggagcatgatttcaacccagaagaggctgaagaaacaaaacaggtgagctggaagcttgtgactgaatatgcaatggagacaaagtgtgatgatgtcctgctcctcctgggaatgtacctggaatttcagtatagctttgaaatgtgtctgaaatgtatcaaaaaggaacagccttctcattataagtatcatgaaaagcactatgccaatgcagctatatttgcagattctaaaaaccagaaaaccatttgtcagcaagctgttgacacagttctggccaagaaaagagtagactctctccagcttaccagggagcagatgttgacaaataggttcaatgaccttctggacagaatggacataatgtttggctcaactggatctgcagatatagaggagtggatggctggagtggcctggctgcactgtctcctccctaaaatggacagtgtagtctatgacttccttaagtgtatggtctataatatccctaaaaagagatactggttgttcaagggacccattgattcagggaaaactacccttgctgctgcacttctggaactctgtggtgggaaagctctcaatgtcaacctgccacttgatagactcaactttgagctgggggtggcaattgatcagtttttggtagtgtttgaagatgtgaaaggtacaggaggagagtccagggatttgcctagtggccaaggcatcaacaatctggacaacctcagagactacctggatgggtctgtaaaggtcaaccttgaaaaaaagcatctcaacaagaggactcaaatatttccacctggaatagtcactatgaatgaatattcagtgcccaagaccctccaggctagatttgtcaagcaaattgatttcagacctaaagattatctgaaacattgtttggagaggagtgagttcctccttgagaaaaggattattcagtcaggaatagcactgcttcttatgctgatatggtatagaccagtggctgagtttgcccaaagcattcagagtagaatagttgagtggaaagaaaggcttgacaaggagttttctctttcagtatatcaaaagatgaagttcaatgtggctatgggtattggagtgcttgattggttgagaaacagtgatgatgatgatgaagattctcaggaaaatgctgataaaaatgaggatgggggagagaagaatatggaagattctggtcatgaaactggcattgatagtcagagccaggggagtttccaggctccacagagctcccaaagtgtccatgaccacaaccagccttaccatatatgcagaggttttacttgtttcaagaaacctcccactccccctccagaacctgaaacatgagcggccgcgactctagatcataatcagccataccacacctccccctgaacctgaaaaatcaatgcaattattgttgaaataaagcacccagcaatgcctgggaccatgtaaaactgtcctggttctttccaaggtatagagcatagcccacaggctgatatttctggccagggttggttggaggacagccttgtctataggaagagaatgaggtttttgcactataagggcatgcaagtcagtcccgcccctaactccacctggttaggaggggaggaggattaataaattgacatatctacctaatttgtgtataataaccctgataaatgcttcaataatattgaaaaaggaagagtcctgtataaaaagaaccagctgtggaatgtgtgtcagttagtaggcttatgcaaagtagcccgcccaagagacaggctgaggcccgcccaccatgatagaacaagatggacttcatgctggatctcctgcagcatgggtggaaagactttttggttatgattgggctcagcagaccattggatgttctgatgctgctgtgttcaggcttagtgcacagggtaggccagtgctctttgtgaagactgatctctctggagctttgaatgaactgcaggatgaggctgctaggctttcatggctggccaccacaggtgtcccttgtgctgcagtgttggatgtggttactgaggctgggagggattggctcctcctgggagaagtgccaggtcaggatctgttgagttctcacctggctccagctgaaaaagtctccataatggcagatgctatgagaaggctgcacacattggacccagctacatgcccatttgaccatcaggccaaacacaggattgagagggccagaacaagaatggaggctgggttggtggaccaggatgaccttgatgaggagcatcagggcctggctccagctgaattgtttgccaggctcaaggctagtatgcctgatggggaggatctggtggtaactcatggtgatgcctgtttgcctaacatcatggtggaaaatggaaggttctctggattcattgattgtggaagactgggtgtagctgacaggtatcaggacatagctcttgcaacaagggatattgcagaggagttgggtggagaatgggctgacaggttcctggtcttgtatggcattgctgccccagacagccaaagaattgctttctataggctgttggatgagtttttctaagctcagcacccacaaagctctcaggtcctaagagacactggcacccatatccatgcatcccttgtataaataaagcatccagcaaagctggtaccatgtaaaactgtcttggttgtttccaaggtatagagcatagctcaataggtttttgactttgtcccgcccctctaagtcctgcacacagatactccaatatgacatacagcatgcttgggaactgagtgcccccatgtgggcagagagcaccatgtgccacagtccctgagaagttcttgggaagggtgggcaattgccatgtgtgcctagagaaggttgtttgtaatactgccaagtgccatgtggtgtgatattggctccatgtgccttgtttgtaataacatttccatgtgtcttgggaagaaccatatataagcagagctggtttagtgaaccctcagataggcctagaccatggccagcagtgagaatgtcataacagagttcatgagattcaaggtgaggatggagggaactgtcaatggtcatgagtttgagattgaaggggaaggggagggcagaccctatgagggccacaacacagtcaaattgaaggtgaccaaagggggaccccttccctttgcctgggacatcctgagcccacagtttcagtatggttccaaagtttatgtaaagcaccctgctgacatccctgactacaagaaactgtccttcccagaaggattcaagtgggaaagggtcatgaactttgaggatggaggggttgcaacagtgacccaggacagttctctccaagatggctgtttcatctacaaggtaaaattcattggtgtgaactttccctctgatggcccagtgatgcaaaaaaagaccatgggctgggaagcctcaacagaaaggctgtaccctagagatggagttctcaagggtgagacccacaaagctctaaagctcaaagatgggggccactatctggtggagttcaagagcatctacatggcaaaaaagccagtgcagttgcctggctattactatgtggatgccaagcttgacataacctcacacaatgaagactacactattgtggaacagtatgagaggactgagggaagacatcatctgtttctgtgaattcgcactgcatggacttacctgcctggtggtatcagtcacaggctctgataaggattcagctgttgtataaataaagcatgcagcctagcaggaaccatgttaatctctcttggttgtttccttggaatactcctaagcacattaggtttttagatctgtagaaaagatcaaaggatcttcttgagatcctttttttctgcgcgtaatctgctgcttgcaaacaaaaaaaccaccgctaccagcggtggtttgtttgccggatcaagagctaccaactctttttccgaaggtaactggcttcagcagagcgcagataccaaatactgtccttctagtgtagccgtagttaggccaccacttcaagaactctgtagcaccgcctacatacctcgctctgctaatcctgttaccagtggctgctgccagtggcgataagtcgtgtcttaccgggttggactcaagacgatagttaccggataaggcgcagcggtcgggctgaacggggggttcgtgcacacagcccagcttggagcgaacgacctacaccgaactgagatacctacagcgtgagctatgagaaagcgccacgcttcccgaagggagaaaggcggacaggtatccggtaagcggcagggtcggaacaggagagcgcacgagggagcttccagggggaaacgcctggtatctttatagtcctgtcgggtttcgccacctctgacttgagcgtcgatttttgtgatgctcgtcaggggggcggagcctatggaaaaacgccagcaacgcggcctttttacgg

SEQ ID NO: 655 - DNA, 8213 bp, Artificial Sequence
  pCzSV5F-I-T-BB3
  CDS (603)...(2189): SV5F
ttcctattaatagtaatcaattacggggtcattagttcatagcccatatatggagttccgcgttacataacttacggtaaatggcccgcctggctgaccgcccaacgacccccgcccattgacgtcaataatgacgtatgttcccatagtaacgccaatagggactttccattgacgtcaatgggtggagtatttacggtaaactgcccacttggcagtacatcaagtgtatcatatgccaagtacgccccctattgacgtcaatgacggtaaatggcccgcctggcattatgcccagtacatgaccttatgggactttcctacttggcagtacatctacgtattagtcatcgctattaccatggtgatgcggttttggcagtacatcaatgggcgtggatagcggtttgactcacggggatttccaagtctccaccccattgacgtcaatgggagtttgttttggcaccaaaatcaacgggactttccaaaatgtcgtaacaactccgccccattgacgcaaatgggcggtaggcgtgtacggtgggaggtctatataagcagagctggtttagtgaaccgtcagatccgctagctagaccatggggactattattcaatttctggtggtcagctgtctgctggctggggcaggatctctggaccctgctgccctcatgcagattggggtgattcctaccaatgtcaggcagctcatgtattatacagaagcttcttctgcctttattgttgtgaagctgatgcctactatagacagtcccatctctggctgtaacattacttcaataagttcctataatgcaactgtgactaagctgctccagcccataggggaaaatctggaaactataagaaaccagctgattcctacaagaaggagaaggagatttgctggagttgtgattgggctggctgccctgggtgtggctacagcagcacaagtgacagctgcagtggccctggtcaaagcaaatgagaatgcagctgccatcctgaatctcaagaatgccatccagaagactaatgctgcagttgctgatgtggtgcaagccacacaatctctgggcacagcagtgcaagcagtgcaggatcatatcaactctgttgtgagcccagcaattacagctgccaactgtaaagcacaagatgccatcattggtagcatactcaatctgtatctgactgagctgaccacaatctttcacaaccagattaccaacccagccctgtctccaattaccatccaggccctcaggatactgctgggctctacactgcccactgtggttgaaaagagctttaatacccagatcagtgcagctgagctgctgtcttctggactcctgacagggcagattgttgggctggacctcacctacatgcagatggttatcaagattgaactgcctacactgactgttcagcctgccactcagattattgatctggcaacaatttcagcctttatcaataaccaggaagtgatggctcagctcccaacaagggttatggtgactggcagtctgatacaggcataccctgccagccagtgcaccataacacccaatacagtgtattgcaggtacaatgatgcccaggtgctgtctgatgacacaatggcctgcctgcaggggaatctgactaggtgcacttttagtccagtggtgggcagctttctgactaggtttgtgctgtttgatggcatagtctatgccaactgcaggtccatgctctgcaaatgcatgcagcctgcagcagttattctgcagccaagtagcagtccagtgacagtgatagacatgtataagtgtgtttctctgcaactggacaacctgaggttcaccatcactcagctggcaaatgttacttacaactcaactattaaactggagtcaagtcagattctgagcattgaccctctggatatctcccagaatctggctgcagtgaataagagcctcagtgatgcactccaacatctggcccagtcagacacctatctctcagccattacctctgcaactaccacctcagtcctgagcattatagctatatgtctgggatcactgggcctgattctgatcatactgctgagtgttgtggtgtggaagctgctgacaattgtggtggccaacaggaataggatggaaaattttgtgtaccacaaatagggatccgcccctctccctcccccccccctaacgttactggccgaagccgcttggaataaggccggtgtgcgtttgtctatatgttattttccaccatattgccgtcttttggcaatgtgagggcccggaaacctggccctgtcttcttgacgagcattcctaggggtctttcccctctcgccaaaggaatgcaaggtctgttgaatgtcgtgaaggaagcagttcctctggaagcttcttgaagacaaacaacgtctgtagcgaccctttgcaggcagcggaaccccccacctggcgacaggtgcctctgcggccaaaagccacgtgtataagatacacctgcaaaggcggcacaaccccagtgccacgttgtgagttggatagttgtggaaagagtcaaatggctctcctcaagcgtattcaacaaggggctgaaggatgcccagaaggtaccccattgtatgggatctgatctggggcctcggtgcacatgctttacatgtgtttagtcgaggttaaaaaaacgtctaggccccccgaaccacggggacgtggttttcctttgaaaaacacgatgataatatggccacaaccatggacaaagtgctgaatagggaggaaagtctgcaactgatggatctgttgggacttgagaggtctgcatggggtaatatcccacttatgaggaaagcatacctgaagaagtgtaaagagttccatcctgacaaaggtggagatgaagagaagatgaaaaagatgaacacactgtataagaaaatggaagatggtgtaaagtatgctcaccagccagattttggaggtttttgggatgccacagagatacctacttatggtacagatgagtgggaacagtggtggaatgcatttaatgaagagaatttgttttgctctgaggaaatgcctagttctgatgatgaggccacagctgactcccagcacagtactccacccaagaaaaagagaaaagtggaagacccaaaggatttcccctctgaactcttgtccttcttgtctcatgcagtgttctcaaataggaccctggcttgctttgctatctacactactaaggagaaggcagctctcttgtacaagaaaatcatggaaaagtattctgtcacctttatttccaggcacaactcctataatcataatattctctttttcttgacaccccataggcatagggtgagtgcaattaacaactatgctcagaagttgtgtactttctccttcctgatctgtaagggtgtgaataaggagtatctcatgtattcagccctgaccagagacccctttagtgtgattgaagaatccctgcctggtgggctcaaggagcatgatttcaacccagaagaggctgaagaaacaaaacaggtgagctggaagcttgtgactgaatatgcaatggagacaaagtgtgatgatgtcctgctcctcctgggaatgtacctggaatttcagtatagctttgaaatgtgtctgaaatgtatcaaaaaggaacagccttctcattataagtatcatgaaaagcactatgccaatgcagctatatttgcagattctaaaaaccagaaaaccatttgtcagcaagctgttgacacagttctggccaagaaaagagtagactctctccagcttaccagggagcagatgttgacaaataggttcaatgaccttctggacagaatggacataatgtttggctcaactggatctgcagatatagaggagtggatggctggagtggcctggctgcactgtctcctccctaaaatggacagtgtagtctatgacttccttaagtgtatggtctataatatccctaaaaagagatactggttgttcaagggacccattgattcagggaaaactacccttgctgctgcacttctggaactctgtggtgggaaagctctcaatgtcaacctgccacttgatagactcaactttgagctgggggtggcaattgatcagtttttggtagtgtttgaagatgtgaaaggtacaggaggagagtccagggatttgcctagtggccaaggcatcaacaatctggacaacctcagagactacctggatgggtctgtaaaggtcaaccttgaaaaaaagcatctcaacaagaggactcaaatatttccacctggaatagtcactatgaatgaatattcagtgcccaagaccctccaggctagatttgtcaagcaaattgatttcagacctaaagattatctgaaacattgtttggagaggagtgagttcctccttgagaaaaggattattcagtcaggaatagcactgcttcttatgctgatatggtatagaccagtggctgagtttgcccaaagcattcagagtagaatagttgagtggaaagaaaggcttgacaaggagttttctctttcagtatatcaaaagatgaagttcaatgtggctatgggtattggagtgcttgattggttgagaaacagtgatgatgatgatgaagattctcaggaaaatgctgataaaaatgaggatgggggagagaagaatatggaagattctggtcatgaaactggcattgatagtcagagccaggggagtttccaggctccacagagctcccaaagtgtccatgaccacaaccagccttaccatatatgcagaggttttacttgtttcaagaaacctcccactccccctccagaacctgaaacatgagcggccgcgactctagatcataatcagccataccacacctccccctgaacctgaaaaatcaatgcaattattgttgaaataaagcacccagcaatgcctgggaccatgtaaaactgtcctggttctttccaaggtatagagcatagcccacaggctgatatttctggccagggttggttggaggacagccttgtctataggaagagaatgaggtttttgcactataagggcatgcaagtcagtcccgcccctaactccacctggttgcccatcccgcccctaactccgcccagttccgcccattctccgccccatggctgactaattttttttatttatgcagaggcggaggccgcctcggcctctgagctattccagaagtagtgaggaggcttttttggaggcccttaattaaattgacatatctacctaatttgtgtataataaccctgataaatgcttcaataatattgaaaaaggaagagtcctgtataaaaagaaccagctgtggaatgtgtgtcagttagtaggcttatgcaaagtagcccgcccaagagacaggctgaggcccgcccaccatgatagaacaagatggacttcatgctggatctcctgcagcatgggtggaaagactttttggttatgattgggctcagcagaccattggatgttctgatgctgctgtgttcaggcttagtgcacagggtaggccagtgctctttgtgaagactgatctctctggagctttgaatgaactgcaggatgaggctgctaggctttcatggctggccaccacaggtgtcccttgtgctgcagtgttggatgtggttactgaggctgggagggattggctcctcctgggagaagtgccaggtcaggatctgttgagttctcacctggctccagctgaaaaagtctccataatggcagatgctatgagaaggctgcacacattggacccagctacatgcccatttgaccatcaggccaaacacaggattgagagggccagaacaagaatggaggctgggttggtggaccaggatgaccttgatgaggagcatcagggcctggctccagctgaattgtttgccaggctcaaggctagtatgcctgatggggaggatctggtggtaactcatggtgatgcctgtttgcctaacatcatggtggaaaatggaaggttctctggattcattgattgtggaagactgggtgtagctgacaggtatcaggacatagctcttgcaacaagggatattgcagaggagttgggtggagaatgggctgacaggttcctggtcttgtatggcattgctgccccagacagccaaagaattgctttctataggctgttggatgagtttttctaagctcagcacccacaaagctctcaggtcctaagagacactggcacccatatccatgcatcccttgtataaataaagcatccagcaaagctggtaccatgtaaaactgtcttggttgtttccaaggtatagagcatagctcaataggtttttgactttgtcccgcccctctaagtcctgcacacagatactccaatatgacatacagcatgcttgggaactgagtgcccccatgtgggcagagagcaccatgtgccacagtccctgagaagttcttgggaagggtgggcaattgccatgtgtgcctagagaaggttgtttgtaatactgccaagtgccatgtggtgtgatattggctccatgtgccttgtttgtaataacatttccatgtgtcttgggaagaaccatatataagcagagctggtttagtgaaccctcagataggcctagaccatggccagcagtgagaatgtcataacagagttcatgagattcaaggtgaggatggagggaactgtcaatggtcatgagtttgagattgaaggggaaggggagggcagaccctatgagggccacaacacagtcaaattgaaggtgaccaaagggggaccccttccctttgcctgggacatcctgagcccacagtttcagtatggttccaaagtttatgtaaagcaccctgctgacatccctgactacaagaaactgtccttcccagaaggattcaagtgggaaagggtcatgaactttgaggatggaggggttgcaacagtgacccaggacagttctctccaagatggctgtttcatctacaaggtaaaattcattggtgtgaactttccctctgatggcccagtgatgcaaaaaaagaccatgggctgggaagcctcaacagaaaggctgtaccctagagatggagttctcaagggtgagacccacaaagctctaaagctcaaagatgggggccactatctggtggagttcaagagcatctacatggcaaaaaagccagtgcagttgcctggctattactatgtggatgccaagcttgacataacctcacacaatgaagactacactattgtggaacagtatgagaggactgagggaagacatcatctgtttctgtgaattcgcactgcatggacttacctgcctggtggtatcagtcacaggctctgataaggattcagctgttgtataaataaagcatgcagcctagcaggaaccatgttaatctctcttggttgtttccttggaatactcctaagcacattaggtttttagatctgtagaaaagatcaaaggatcttcttgagatcctttttttctgcgcgtaatctgctgcttgcaaacaaaaaaaccaccgctaccagcggtggtttgtttgccggatcaagagctaccaactctttttccgaaggtaactggcttcagcagagcgcagataccaaatactgtccttctagtgtagccgtagttaggccaccacttcaagaactctgtagcaccgcctacatacctcgctctgctaatcctgttaccagtggctgctgccagtggcgataagtcgtgtcttaccgggttggactcaagacgatagttaccggataaggcgcagcggtcgggctgaacggggggttcgtgcacacagcccagcttggagcgaacgacctacaccgaactgagatacctacagcgtgagctatgagaaagcgccacgcttcccgaagggagaaaggcggacaggtatccggtaagcggcagggtcggaacaggagagcgcacgagggagcttccagggggaaacgcctggtatctttatagtcctgtcgggtttcgccacctctgacttgagcgtcgatttttgtgatgctcgtcaggggggcggagcctatggaaaaacgccagcaacgcggcctttttacgg

SEQ ID NO: 656 - DNA, 8086 bp, Artificial Sequence
  pCzSV5F-I-T-dSV
  CDS (603)...(2189): SV5F
ttcctattaatagtaatcaattacggggtcattagttcatagcccatatatggagttccgcgttacataacttacggtaaatggcccgcctggctgaccgcccaacgacccccgcccattgacgtcaataatgacgtatgttcccatagtaacgccaatagggactttccattgacgtcaatgggtggagtatttacggtaaactgcccacttggcagtacatcaagtgtatcatatgccaagtacgccccctattgacgtcaatgacggtaaatggcccgcctggcattatgcccagtacatgaccttatgggactttcctacttggcagtacatctacgtattagtcatcgctattaccatggtgatgcggttttggcagtacatcaatgggcgtggatagcggtttgactcacggggatttccaagtctccaccccattgacgtcaatgggagtttgttttggcaccaaaatcaacgggactttccaaaatgtcgtaacaactccgccccattgacgcaaatgggcggtaggcgtgtacggtgggaggtctatataagcagagctggtttagtgaaccgtcagatccgctagctagaccatggggactattattcaatttctggtggtcagctgtctgctggctggggcaggatctctggaccctgctgccctcatgcagattggggtgattcctaccaatgtcaggcagctcatgtattatacagaagcttcttctgcctttattgttgtgaagctgatgcctactatagacagtcccatctctggctgtaacattacttcaataagttcctataatgcaactgtgactaagctgctccagcccataggggaaaatctggaaactataagaaaccagctgattcctacaagaaggagaaggagatttgctggagttgtgattgggctggctgccctgggtgtggctacagcagcacaagtgacagctgcagtggccctggtcaaagcaaatgagaatgcagctgccatcctgaatctcaagaatgccatccagaagactaatgctgcagttgctgatgtggtgcaagccacacaatctctgggcacagcagtgcaagcagtgcaggatcatatcaactctgttgtgagcccagcaattacagctgccaactgtaaagcacaagatgccatcattggtagcatactcaatctgtatctgactgagctgaccacaatctttcacaaccagattaccaacccagccctgtctccaattaccatccaggccctcaggatactgctgggctctacactgcccactgtggttgaaaagagctttaatacccagatcagtgcagctgagctgctgtcttctggactcctgacagggcagattgttgggctggacctcacctacatgcagatggttatcaagattgaactgcctacactgactgttcagcctgccactcagattattgatctggcaacaatttcagcctttatcaataaccaggaagtgatggctcagctcccaacaagggttatggtgactggcagtctgatacaggcataccctgccagccagtgcaccataacacccaatacagtgtattgcaggtacaatgatgcccaggtgctgtctgatgacacaatggcctgcctgcaggggaatctgactaggtgcacttttagtccagtggtgggcagctttctgactaggtttgtgctgtttgatggcatagtctatgccaactgcaggtccatgctctgcaaatgcatgcagcctgcagcagttattctgcagccaagtagcagtccagtgacagtgatagacatgtataagtgtgtttctctgcaactggacaacctgaggttcaccatcactcagctggcaaatgttacttacaactcaactattaaactggagtcaagtcagattctgagcattgaccctctggatatctcccagaatctggctgcagtgaataagagcctcagtgatgcactccaacatctggcccagtcagacacctatctctcagccattacctctgcaactaccacctcagtcctgagcattatagctatatgtctgggatcactgggcctgattctgatcatactgctgagtgttgtggtgtggaagctgctgacaattgtggtggccaacaggaataggatggaaaattttgtgtaccacaaatagggatccgcccctctccctcccccccccctaacgttactggccgaagccgcttggaataaggccggtgtgcgtttgtctatatgttattttccaccatattgccgtcttttggcaatgtgagggcccggaaacctggccctgtcttcttgacgagcattcctaggggtctttcccctctcgccaaaggaatgcaaggtctgttgaatgtcgtgaaggaagcagttcctctggaagcttcttgaagacaaacaacgtctgtagcgaccctttgcaggcagcggaaccccccacctggcgacaggtgcctctgcggccaaaagccacgtgtataagatacacctgcaaaggcggcacaaccccagtgccacgttgtgagttggatagttgtggaaagagtcaaatggctctcctcaagcgtattcaacaaggggctgaaggatgcccagaaggtaccccattgtatgggatctgatctggggcctcggtgcacatgctttacatgtgtttagtcgaggttaaaaaaacgtctaggccccccgaaccacggggacgtggttttcctttgaaaaacacgatgataatatggccacaaccatggacaaagtgctgaatagggaggaaagtctgcaactgatggatctgttgggacttgagaggtctgcatggggtaatatcccacttatgaggaaagcatacctgaagaagtgtaaagagttccatcctgacaaaggtggagatgaagagaagatgaaaaagatgaacacactgtataagaaaatggaagatggtgtaaagtatgctcaccagccagattttggaggtttttgggatgccacagagatacctacttatggtacagatgagtgggaacagtggtggaatgcatttaatgaagagaatttgttttgctctgaggaaatgcctagttctgatgatgaggccacagctgactcccagcacagtactccacccaagaaaaagagaaaagtggaagacccaaaggatttcccctctgaactcttgtccttcttgtctcatgcagtgttctcaaataggaccctggcttgctttgctatctacactactaaggagaaggcagctctcttgtacaagaaaatcatggaaaagtattctgtcacctttatttccaggcacaactcctataatcataatattctctttttcttgacaccccataggcatagggtgagtgcaattaacaactatgctcagaagttgtgtactttctccttcctgatctgtaagggtgtgaataaggagtatctcatgtattcagccctgaccagagacccctttagtgtgattgaagaatccctgcctggtgggctcaaggagcatgatttcaacccagaagaggctgaagaaacaaaacaggtgagctggaagcttgtgactgaatatgcaatggagacaaagtgtgatgatgtcctgctcctcctgggaatgtacctggaatttcagtatagctttgaaatgtgtctgaaatgtatcaaaaaggaacagccttctcattataagtatcatgaaaagcactatgccaatgcagctatatttgcagattctaaaaaccagaaaaccatttgtcagcaagctgttgacacagttctggccaagaaaagagtagactctctccagcttaccagggagcagatgttgacaaataggttcaatgaccttctggacagaatggacataatgtttggctcaactggatctgcagatatagaggagtggatggctggagtggcctggctgcactgtctcctccctaaaatggacagtgtagtctatgacttccttaagtgtatggtctataatatccctaaaaagagatactggttgttcaagggacccattgattcagggaaaactacccttgctgctgcacttctggaactctgtggtgggaaagctctcaatgtcaacctgccacttgatagactcaactttgagctgggggtggcaattgatcagtttttggtagtgtttgaagatgtgaaaggtacaggaggagagtccagggatttgcctagtggccaaggcatcaacaatctggacaacctcagagactacctggatgggtctgtaaaggtcaaccttgaaaaaaagcatctcaacaagaggactcaaatatttccacctggaatagtcactatgaatgaatattcagtgcccaagaccctccaggctagatttgtcaagcaaattgatttcagacctaaagattatctgaaacattgtttggagaggagtgagttcctccttgagaaaaggattattcagtcaggaatagcactgcttcttatgctgatatggtatagaccagtggctgagtttgcccaaagcattcagagtagaatagttgagtggaaagaaaggcttgacaaggagttttctctttcagtatatcaaaagatgaagttcaatgtggctatgggtattggagtgcttgattggttgagaaacagtgatgatgatgatgaagattctcaggaaaatgctgataaaaatgaggatgggggagagaagaatatggaagattctggtcatgaaactggcattgatagtcagagccaggggagtttccaggctccacagagctcccaaagtgtccatgaccacaaccagccttaccatatatgcagaggttttacttgtttcaagaaacctcccactccccctccagaacctgaaacatgagcggccgcgactctagatcataatcagccataccacacctccccctgaacctgaaaaatcaatgcaattattgttgaaataaagcacccagcaatgcctgggaccatgtaaaactgtcctggttctttccaaggtatagagcatagcccacaggctgatatttctggccagggttggttggaggacagccttgtctataggaagagaatgaggtttttgcactataagggcatgcaagtcagtcccgcccctaactccacctggttaggaggggaggaggataattaaattgacatatctacctaatttgtgtataataaccctgataaatgcttcaataatattgaaaaaggaagagtcctgtataaaaagaaccagctgtggaatgtgtgtcagttagtaggcttatgcaaagtagcccgcccaagagacaggctgaggcccgcccaccatgatagaacaagatggacttcatgctggatctcctgcagcatgggtggaaagactttttggttatgattgggctcagcagaccattggatgttctgatgctgctgtgttcaggcttagtgcacagggtaggccagtgctctttgtgaagactgatctctctggagctttgaatgaactgcaggatgaggctgctaggctttcatggctggccaccacaggtgtcccttgtgctgcagtgttggatgtggttactgaggctgggagggattggctcctcctgggagaagtgccaggtcaggatctgttgagttctcacctggctccagctgaaaaagtctccataatggcagatgctatgagaaggctgcacacattggacccagctacatgcccatttgaccatcaggccaaacacaggattgagagggccagaacaagaatggaggctgggttggtggaccaggatgaccttgatgaggagcatcagggcctggctccagctgaattgtttgccaggctcaaggctagtatgcctgatggggaggatctggtggtaactcatggtgatgcctgtttgcctaacatcatggtggaaaatggaaggttctctggattcattgattgtggaagactgggtgtagctgacaggtatcaggacatagctcttgcaacaagggatattgcagaggagttgggtggagaatgggctgacaggttcctggtcttgtatggcattgctgccccagacagccaaagaattgctttctataggctgttggatgagtttttctaagctcagcacccacaaagctctcaggtcctaagagacactggcacccatatccatgcatcccttgtataaataaagcatccagcaaagctggtaccatgtaaaactgtcttggttgtttccaaggtatagagcatagctcaataggtttttgactttgtcccgcccctctaagtcctgcacacagatactccaatatgacatacagcatgcttgggaactgagtgcccccatgtgggcagagagcaccatgtgccacagtccctgagaagttcttgggaagggtgggcaattgccatgtgtgcctagagaaggttgtttgtaatactgccaagtgccatgtggtgtgatattggctccatgtgccttgtttgtaataacatttccatgtgtcttgggaagaaccatatataagcagagctggtttagtgaaccctcagataggcctagaccatggccagcagtgagaatgtcataacagagttcatgagattcaaggtgaggatggagggaactgtcaatggtcatgagtttgagattgaaggggaaggggagggcagaccctatgagggccacaacacagtcaaattgaaggtgaccaaagggggaccccttccctttgcctgggacatcctgagcccacagtttcagtatggttccaaagtttatgtaaagcaccctgctgacatccctgactacaagaaactgtccttcccagaaggattcaagtgggaaagggtcatgaactttgaggatggaggggttgcaacagtgacccaggacagttctctccaagatggctgtttcatctacaaggtaaaattcattggtgtgaactttccctctgatggcccagtgatgcaaaaaaagaccatgggctgggaagcctcaacagaaaggctgtaccctagagatggagttctcaagggtgagacccacaaagctctaaagctcaaagatgggggccactatctggtggagttcaagagcatctacatggcaaaaaagccagtgcagttgcctggctattactatgtggatgccaagcttgacataacctcacacaatgaagactacactattgtggaacagtatgagaggactgagggaagacatcatctgtttctgtgaattcgcactgcatggacttacctgcctggtggtatcagtcacaggctctgataaggattcagctgttgtataaataaagcatgcagcctagcaggaaccatgttaatctctcttggttgtttccttggaatactcctaagcacattaggtttttagatctgtagaaaagatcaaaggatcttcttgagatcctttttttctgcgcgtaatctgctgcttgcaaacaaaaaaaccaccgctaccagcggtggtttgtttgccggatcaagagctaccaactctttttccgaaggtaactggcttcagcagagcgcagataccaaatactgtccttctagtgtagccgtagttaggccaccacttcaagaactctgtagcaccgcctacatacctcgctctgctaatcctgttaccagtggctgctgccagtggcgataagtcgtgtcttaccgggttggactcaagacgatagttaccggataaggcgcagcggtcgggctgaacggggggttcgtgcacacagcccagcttggagcgaacgacctacaccgaactgagatacctacagcgtgagctatgagaaagcgccacgcttcccgaagggagaaaggcggacaggtatccggtaagcggcagggtcggaacaggagagcgcacgagggagcttccagggggaaacgcctggtatctttatagtcctgtcgggtttcgccacctctgacttgagcgtcgatttttgtgatgctcgtcaggggggcggagcctatggaaaaacgccagcaacgcggcctttttacgg

SEQ ID NO: 657 - DNA, 7918 bp, Artificial Sequence
  pCzVSVG-I-T-BB3
ttcctattaatagtaatcaattacggggtcattagttcatagcccatatatggagttccgcgttacataacttacggtaaatggcccgcctggctgaccgcccaacgacccccgcccattgacgtcaataatgacgtatgttcccatagtaacgccaatagggactttccattgacgtcaatgggtggagtatttacggtaaactgcccacttggcagtacatcaagtgtatcatatgccaagtacgccccctattgacgtcaatgacggtaaatggcccgcctggcattatgcccagtacatgaccttatgggactttcctacttggcagtacatctacgtattagtcatcgctattaccatggtgatgcggttttggcagtacatcaatgggcgtggatagcggtttgactcacggggatttccaagtctccaccccattgacgtcaatgggagtttgttttggcaccaaaatcaacgggactttccaaaatgtcgtaacaactccgccccattgacgcaaatgggcggtaggcgtgtacggtgggaggtctatataagcagagctggtttagtgaaccgtcagatccgctagctagaccatgaaatgctatgctggggtaaactgcaagacagtccataacaaggggaattggaaaaatgtgtccaattaccattattgttcatcctctgataattggcacaatgatggcacagctgtgaaaatgaagtcccacaaggctgcagatggatggatgtgtcatgccagcaagtgggttaccacttgtgacaggtggtatgggaaatacacccattctaggtccacctctgtgtgtaagtctacaaagggtacttggaatggctcctgtggatatgccacagtaactgatgctgcagtggttgtgacccaccatgtggttgactacactggttgggtggactccaatggtaagtgtagcaactactgtactgttcataacagtaccacttggcattcagattataaagtcaaggggtgtgattcaaactccatggacacctctgatggttcaagtggaaaaggaacaggcagatctaactatgcttatactggtggtaaggcatgtaagatgtactgtaaacattggggagttaggtctggagtgtggatggcagataaggatgctgcagccaggtgtggtagtagttctgccagcacttctgttgatgtgtctgatgtgagagattactcatgcacttggagtaagagggcaggtagtgtagatagttatgcaaaaaatggcactggggccacaaatggcacaaaatataccagatacagggtggatgcagcctctaggatggtgggtatgagtgggaccaccactaggtgggatgactgggcatatgatgttgggaatggagtgagaacatcatcaggctacaaatacatgggacatggtatggatagtgatcatagttcaaaggctgtgcaccatgatgctgcatctgatgactcaggagacactgggagtaagaatgttggttggtcttcttggaaatctagtgcatctgggggtgttagagtaggacactgcaagaaacatactaaaaagaggtatactgacattgagatgaatagagggaaatgaggatccgcccctctccctcccccccccctaacgttactggccgaagccgcttggaataaggccggtgtgcgtttgtctatatgttattttccaccatattgccgtcttttggcaatgtgagggcccggaaacctggccctgtcttcttgacgagcattcctaggggtctttcccctctcgccaaaggaatgcaaggtctgttgaatgtcgtgaaggaagcagttcctctggaagcttcttgaagacaaacaacgtctgtagcgaccctttgcaggcagcggaaccccccacctggcgacaggtgcctctgcggccaaaagccacgtgtataagatacacctgcaaaggcggcacaaccccagtgccacgttgtgagttggatagttgtggaaagagtcaaatggctctcctcaagcgtattcaacaaggggctgaaggatgcccagaaggtaccccattgtatgggatctgatctggggcctcggtgcacatgctttacatgtgtttagtcgaggttaaaaaaacgtctaggccccccgaaccacggggacgtggttttcctttgaaaaacacgatgataatatggccacaaccatggacaaagtgctgaatagggaggaaagtctgcaactgatggatctgttgggacttgagaggtctgcatggggtaatatcccacttatgaggaaagcatacctgaagaagtgtaaagagttccatcctgacaaaggtggagatgaagagaagatgaaaaagatgaacacactgtataagaaaatggaagatggtgtaaagtatgctcaccagccagattttggaggtttttgggatgccacagagatacctacttatggtacagatgagtgggaacagtggtggaatgcatttaatgaagagaatttgttttgctctgaggaaatgcctagttctgatgatgaggccacagctgactcccagcacagtactccacccaagaaaaagagaaaagtggaagacccaaaggatttcccctctgaactcttgtccttcttgtctcatgcagtgttctcaaataggaccctggcttgctttgctatctacactactaaggagaaggcagctctcttgtacaagaaaatcatggaaaagtattctgtcacctttatttccaggcacaactcctataatcataatattctctttttcttgacaccccataggcatagggtgagtgcaattaacaactatgctcagaagttgtgtactttctccttcctgatctgtaagggtgtgaataaggagtatctcatgtattcagccctgaccagagacccctttagtgtgattgaagaatccctgcctggtgggctcaaggagcatgatttcaacccagaagaggctgaagaaacaaaacaggtgagctggaagcttgtgactgaatatgcaatggagacaaagtgtgatgatgtcctgctcctcctgggaatgtacctggaatttcagtatagctttgaaatgtgtctgaaatgtatcaaaaaggaacagccttctcattataagtatcatgaaaagcactatgccaatgcagctatatttgcagattctaaaaaccagaaaaccatttgtcagcaagctgttgacacagttctggccaagaaaagagtagactctctccagcttaccagggagcagatgttgacaaataggttcaatgaccttctggacagaatggacataatgtttggctcaactggatctgcagatatagaggagtggatggctggagtggcctggctgcactgtctcctccctaaaatggacagtgtagtctatgacttccttaagtgtatggtctataatatccctaaaaagagatactggttgttcaagggacccattgattcagggaaaactacccttgctgctgcacttctggaactctgtggtgggaaagctctcaatgtcaacctgccacttgatagactcaactttgagctgggggtggcaattgatcagtttttggtagtgtttgaagatgtgaaaggtacaggaggagagtccagggatttgcctagtggccaaggcatcaacaatctggacaacctcagagactacctggatgggtctgtaaaggtcaaccttgaaaaaaagcatctcaacaagaggactcaaatatttccacctggaatagtcactatgaatgaatattcagtgcccaagaccctccaggctagatttgtcaagcaaattgatttcagacctaaagattatctgaaacattgtttggagaggagtgagttcctccttgagaaaaggattattcagtcaggaatagcactgcttcttatgctgatatggtatagaccagtggctgagtttgcccaaagcattcagagtagaatagttgagtggaaagaaaggcttgacaaggagttttctctttcagtatatcaaaagatgaagttcaatgtggctatgggtattggagtgcttgattggttgagaaacagtgatgatgatgatgaagattctcaggaaaatgctgataaaaatgaggatgggggagagaagaatatggaagattctggtcatgaaactggcattgatagtcagagccaggggagtttccaggctccacagagctcccaaagtgtccatgaccacaaccagccttaccatatatgcagaggttttacttgtttcaagaaacctcccactccccctccagaacctgaaacatgagcggccgcgactctagatcataatcagccataccacacctccccctgaacctgaaaaatcaatgcaattattgttgaaataaagcacccagcaatgcctgggaccatgtaaaactgtcctggttctttccaaggtatagagcatagcccacaggctgatatttctggccagggttggttggaggacagccttgtctataggaagagaatgaggtttttgcactataagggcatgcaagtcagtcccgcccctaactccacctggttgcccatcccgcccctaactccgcccagttccgcccattctccgccccatggctgactaattttttttatttatgcagaggcggaggccgcctcggcctctgagctattccagaagtagtgaggaggcttttttggaggcccttaattaaattgacatatctacctaatttgtgtataataaccctgataaatgcttcaataatattgaaaaaggaagagtcctgtataaaaagaaccagctgtggaatgtgtgtcagttagtaggcttatgcaaagtagcccgcccaagagacaggctgaggcccgcccaccatgatagaacaagatggacttcatgctggatctcctgcagcatgggtggaaagactttttggttatgattgggctcagcagaccattggatgttctgatgctgctgtgttcaggcttagtgcacagggtaggccagtgctctttgtgaagactgatctctctggagctttgaatgaactgcaggatgaggctgctaggctttcatggctggccaccacaggtgtcccttgtgctgcagtgttggatgtggttactgaggctgggagggattggctcctcctgggagaagtgccaggtcaggatctgttgagttctcacctggctccagctgaaaaagtctccataatggcagatgctatgagaaggctgcacacattggacccagctacatgcccatttgaccatcaggccaaacacaggattgagagggccagaacaagaatggaggctgggttggtggaccaggatgaccttgatgaggagcatcagggcctggctccagctgaattgtttgccaggctcaaggctagtatgcctgatggggaggatctggtggtaactcatggtgatgcctgtttgcctaacatcatggtggaaaatggaaggttctctggattcattgattgtggaagactgggtgtagctgacaggtatcaggacatagctcttgcaacaagggatattgcagaggagttgggtggagaatgggctgacaggttcctggtcttgtatggcattgctgccccagacagccaaagaattgctttctataggctgttggatgagtttttctaagctcagcacccacaaagctctcaggtcctaagagacactggcacccatatccatgcatcccttgtataaataaagcatccagcaaagctggtaccatgtaaaactgtcttggttgtttccaaggtatagagcatagctcaataggtttttgactttgtcccgcccctctcacagatactccaatgatcacttggcggtgttaggaatttggcgcgtaaaagtggccgggactttgtagtcagttccattcagggggcggagtagaccatggccagttacccctgtcatcagcatgcttctgcatttgatcaggctgcaaggtccagaggacactccaacagaaggacagctctcagacctagaaggcagcaggaagccacagaggtcagattggaacagaagatgcctaccctgctgagagtgtacattgatggacctcatgggatgggtaaaactacaactacacaactgctggttgccttgggcagtagggatgatattgtgtatgtgccagagcccatgacctattggcaggtgcttggggccagtgagactatagcaaatatctacacaactcagcacagacttgaccagggagagatttctgctggagatgcagctgtggttatgacttctgcccagatcaccatggggatgccctatgctgtgacagatgcagtcctggctccacatgtgggaggtgaagcaggcagctcccatgcacctccaccagccctgaccctgatttttgacaggcatcccattgctgcactgctttgctacccagcagctaggtacctgatgggcagcatgacaccacaggctgtgcttgcatttgtggcccttatccctccaacactgcctggcacaaacattgtgctgggggccctgccagaagataggcacatagacagactggccaaaaggcagagacctggagagagattggacctggctatgcttgcagctatcagaagggtctatggcctgctggccaatacagtaagatacttgcaggggggaggttcctggtgggaggactgggggcagctgtctggtacagcagttcctccacagggagcagaacctcagtctaatgctggacccagaccccatattggagacaccctcttcactctctttagagctcctgaactgcttgctcctaatggagatttgtacaatgtttttgcctgggctcttgatgtcctggctaagagactcaggccaatgcatgttttcattctggactatgaccaaagccctgcaggatgcagggatgccttgctccaactgacttctggcatggtacagactcatgttacaacaccaggctccattccaacaatatgtgatctggccagaacttttgctagggagatgggggaggcaaattgagcactgcatggacttacctgcctggtggtatcagtcacaggctctgataaggattcagctgttgtataaataaagcatgcagcctagcaggaaccatgttaatctctcttggttgtttccttggaatactcctaagcacattaggtttttagatctgtagaaaagatcaaaggatcttcttgagatcctttttttctgcgcgtaatctgctgcttgcaaacaaaaaaaccaccgctaccagcggtggtttgtttgccggatcaagagctaccaactctttttccgaaggtaactggcttcagcagagcgcagataccaaatactgtccttctagtgtagccgtagttaggccaccacttcaagaactctgtagcaccgcctacatacctcgctctgctaatcctgttaccagtggctgctgccagtggcgataagtcgtgtcttaccgggttggactcaagacgatagttaccggataaggcgcagcggtcgggctgaacggggggttcgtgcacacagcccagcttggagcgaacgacctacaccgaactgagatacctacagcgtgagctatgagaaagcgccacgcttcccgaagggagaaaggcggacaggtatccggtaagcggcagggtcggaacaggagagcgcacgagggagcttccagggggaaacgcctggtatctttatagtcctgtcgggtttcgccacctctgacttgagcgtcgatttttgtgatgctcgtcaggggggcggagcctatggaaaaacgccagcaacgcggcctttttacgg

SEQ ID NO: 658 - DNA, 7525 bp, Artificial Sequence
  pCzVSVG-I-T-dSV
ttcctattaatagtaatcaattacggggtcattagttcatagcccatatatggagttccgcgttacataacttacggtaaatggcccgcctggctgaccgcccaacgacccccgcccattgacgtcaataatgacgtatgttcccatagtaacgccaatagggactttccattgacgtcaatgggtggagtatttacggtaaactgcccacttggcagtacatcaagtgtatcatatgccaagtacgccccctattgacgtcaatgacggtaaatggcccgcctggcattatgcccagtacatgaccttatgggactttcctacttggcagtacatctacgtattagtcatcgctattaccatggtgatgcggttttggcagtacatcaatgggcgtggatagcggtttgactcacggggatttccaagtctccaccccattgacgtcaatgggagtttgttttggcaccaaaatcaacgggactttccaaaatgtcgtaacaactccgccccattgacgcaaatgggcggtaggcgtgtacggtgggaggtctatataagcagagctggtttagtgaaccgtcagatccgctagctagaccatgaaatgctatgctggggtaaactgcaagacagtccataacaaggggaattggaaaaatgtgtccaattaccattattgttcatcctctgataattggcacaatgatggcacagctgtgaaaatgaagtcccacaaggctgcagatggatggatgtgtcatgccagcaagtgggttaccacttgtgacaggtggtatgggaaatacacccattctaggtccacctctgtgtgtaagtctacaaagggtacttggaatggctcctgtggatatgccacagtaactgatgctgcagtggttgtgacccaccatgtggttgactacactggttgggtggactccaatggtaagtgtagcaactactgtactgttcataacagtaccacttggcattcagattataaagtcaaggggtgtgattcaaactccatggacacctctgatggttcaagtggaaaaggaacaggcagatctaactatgcttatactggtggtaaggcatgtaagatgtactgtaaacattggggagttaggtctggagtgtggatggcagataaggatgctgcagccaggtgtggtagtagttctgccagcacttctgttgatgtgtctgatgtgagagattactcatgcacttggagtaagagggcaggtagtgtagatagttatgcaaaaaatggcactggggccacaaatggcacaaaatataccagatacagggtggatgcagcctctaggatggtgggtatgagtgggaccaccactaggtgggatgactgggcatatgatgttgggaatggagtgagaacatcatcaggctacaaatacatgggacatggtatggatagtgatcatagttcaaaggctgtgcaccatgatgctgcatctgatgactcaggagacactgggagtaagaatgttggttggtcttcttggaaatctagtgcatctgggggtgttagagtaggacactgcaagaaacatactaaaaagaggtatactgacattgagatgaatagagggaaatgaggatccgcccctctccctcccccccccctaacgttactggccgaagccgcttggaataaggccggtgtgcgtttgtctatatgttattttccaccatattgccgtcttttggcaatgtgagggcccggaaacctggccctgtcttcttgacgagcattcctaggggtctttcccctctcgccaaaggaatgcaaggtctgttgaatgtcgtgaaggaagcagttcctctggaagcttcttgaagacaaacaacgtctgtagcgaccctttgcaggcagcggaaccccccacctggcgacaggtgcctctgcggccaaaagccacgtgtataagatacacctgcaaaggcggcacaaccccagtgccacgttgtgagttggatagttgtggaaagagtcaaatggctctcctcaagcgtattcaacaaggggctgaaggatgcccagaaggtaccccattgtatgggatctgatctggggcctcggtgcacatgctttacatgtgtttagtcgaggttaaaaaaacgtctaggccccccgaaccacggggacgtggttttcctttgaaaaacacgatgataatatggccacaaccatggacaaagtgctgaatagggaggaaagtctgcaactgatggatctgttgggacttgagaggtctgcatggggtaatatcccacttatgaggaaagcatacctgaagaagtgtaaagagttccatcctgacaaaggtggagatgaagagaagatgaaaaagatgaacacactgtataagaaaatggaagatggtgtaaagtatgctcaccagccagattttggaggtttttgggatgccacagagatacctacttatggtacagatgagtgggaacagtggtggaatgcatttaatgaagagaatttgttttgctctgaggaaatgcctagttctgatgatgaggccacagctgactcccagcacagtactccacccaagaaaaagagaaaagtggaagacccaaaggatttcccctctgaactcttgtccttcttgtctcatgcagtgttctcaaataggaccctggcttgctttgctatctacactactaaggagaaggcagctctcttgtacaagaaaatcatggaaaagtattctgtcacctttatttccaggcacaactcctataatcataatattctctttttcttgacaccccataggcatagggtgagtgcaattaacaactatgctcagaagttgtgtactttctccttcctgatctgtaagggtgtgaataaggagtatctcatgtattcagccctgaccagagacccctttagtgtgattgaagaatccctgcctggtgggctcaaggagcatgatttcaacccagaagaggctgaagaaacaaaacaggtgagctggaagcttgtgactgaatatgcaatggagacaaagtgtgatgatgtcctgctcctcctgggaatgtacctggaatttcagtatagctttgaaatgtgtctgaaatgtatcaaaaaggaacagccttctcattataagtatcatgaaaagcactatgccaatgcagctatatttgcagattctaaaaaccagaaaaccatttgtcagcaagctgttgacacagttctggccaagaaaagagtagactctctccagcttaccagggagcagatgttgacaaataggttcaatgaccttctggacagaatggacataatgtttggctcaactggatctgcagatatagaggagtggatggctggagtggcctggctgcactgtctcctccctaaaatggacagtgtagtctatgacttccttaagtgtatggtctataatatccctaaaaagagatactggttgttcaagggacccattgattcagggaaaactacccttgctgctgcacttctggaactctgtggtgggaaagctctcaatgtcaacctgccacttgatagactcaactttgagctgggggtggcaattgatcagtttttggtagtgtttgaagatgtgaaaggtacaggaggagagtccagggatttgcctagtggccaaggcatcaacaatctggacaacctcagagactacctggatgggtctgtaaaggtcaaccttgaaaaaaagcatctcaacaagaggactcaaatatttccacctggaatagtcactatgaatgaatattcagtgcccaagaccctccaggctagatttgtcaagcaaattgatttcagacctaaagattatctgaaacattgtttggagaggagtgagttcctccttgagaaaaggattattcagtcaggaatagcactgcttcttatgctgatatggtatagaccagtggctgagtttgcccaaagcattcagagtagaatagttgagtggaaagaaaggcttgacaaggagttttctctttcagtatatcaaaagatgaagttcaatgtggctatgggtattggagtgcttgattggttgagaaacagtgatgatgatgatgaagattctcaggaaaatgctgataaaaatgaggatgggggagagaagaatatggaagattctggtcatgaaactggcattgatagtcagagccaggggagtttccaggctccacagagctcccaaagtgtccatgaccacaaccagccttaccatatatgcagaggttttacttgtttcaagaaacctcccactccccctccagaacctgaaacatgagcggccgcgactctagatcataatcagccataccacacctccccctgaacctgaaaaatcaatgcaattattgttgaaataaagcacccagcaatgcctgggaccatgtaaaactgtcctggttctttccaaggtatagagcatagcccacaggctgatatttctggccagggttggttggaggacagccttgtctataggaagagaatgaggtttttgcactataagggcatgcaagtcagtcccgcccctaactccacctggttaggaggggaggaggataattaaattgacatatctacctaatttgtgtataataaccctgataaatgcttcaataatattgaaaaaggaagagtcctgtataaaaagaaccagctgtggaatgtgtgtcagttagtaggcttatgcaaagtagcccgcccaagagacaggctgaggcccgcccaccatgatagaacaagatggacttcatgctggatctcctgcagcatgggtggaaagactttttggttatgattgggctcagcagaccattggatgttctgatgctgctgtgttcaggcttagtgcacagggtaggccagtgctctttgtgaagactgatctctctggagctttgaatgaactgcaggatgaggctgctaggctttcatggctggccaccacaggtgtcccttgtgctgcagtgttggatgtggttactgaggctgggagggattggctcctcctgggagaagtgccaggtcaggatctgttgagttctcacctggctccagctgaaaaagtctccataatggcagatgctatgagaaggctgcacacattggacccagctacatgcccatttgaccatcaggccaaacacaggattgagagggccagaacaagaatggaggctgggttggtggaccaggatgaccttgatgaggagcatcagggcctggctccagctgaattgtttgccaggctcaaggctagtatgcctgatggggaggatctggtggtaactcatggtgatgcctgtttgcctaacatcatggtggaaaatggaaggttctctggattcattgattgtggaagactgggtgtagctgacaggtatcaggacatagctcttgcaacaagggatattgcagaggagttgggtggagaatgggctgacaggttcctggtcttgtatggcattgctgccccagacagccaaagaattgctttctataggctgttggatgagtttttctaagctcagcacccacaaagctctcaggtcctaagagacactggcacccatatccatgcatcccttgtataaataaagcatccagcaaagctggtaccatgtaaaactgtcttggttgtttccaaggtatagagcatagctcaataggtttttgactttgtcccgcccctctaagtcctgcacacagatactccaatatgacatacagcatgcttgggaactgagtgcccccatgtgggcagagagcaccatgtgccacagtccctgagaagttcttgggaagggtgggcaattgccatgtgtgcctagagaaggttgtttgtaatactgccaagtgccatgtggtgtgatattggctccatgtgccttgtttgtaataacatttccatgtgtcttgggaagaaccatatataagcagagctggtttagtgaaccctcagataggcctagaccatggccagcagtgagaatgtcataacagagttcatgagattcaaggtgaggatggagggaactgtcaatggtcatgagtttgagattgaaggggaaggggagggcagaccctatgagggccacaacacagtcaaattgaaggtgaccaaagggggaccccttccctttgcctgggacatcctgagcccacagtttcagtatggttccaaagtttatgtaaagcaccctgctgacatccctgactacaagaaactgtccttcccagaaggattcaagtgggaaagggtcatgaactttgaggatggaggggttgcaacagtgacccaggacagttctctccaagatggctgtttcatctacaaggtaaaattcattggtgtgaactttccctctgatggcccagtgatgcaaaaaaagaccatgggctgggaagcctcaacagaaaggctgtaccctagagatggagttctcaagggtgagacccacaaagctctaaagctcaaagatgggggccactatctggtggagttcaagagcatctacatggcaaaaaagccagtgcagttgcctggctattactatgtggatgccaagcttgacataacctcacacaatgaagactacactattgtggaacagtatgagaggactgagggaagacatcatctgtttctgtgaattcgcactgcatggacttacctgcctggtggtatcagtcacaggctctgataaggattcagctgttgtataaataaagcatgcagcctagcaggaaccatgttaatctctcttggttgtttccttggaatactcctaagcacattaggtttttagatctgtagaaaagatcaaaggatcttcttgagatcctttttttctgcgcgtaatctgctgcttgcaaacaaaaaaaccaccgctaccagcggtggtttgtttgccggatcaagagctaccaactctttttccgaaggtaactggcttcagcagagcgcagataccaaatactgtccttctagtgtagccgtagttaggccaccacttcaagaactctgtagcaccgcctacatacctcgctctgctaatcctgttaccagtggctgctgccagtggcgataagtcgtgtcttaccgggttggactcaagacgatagttaccggataaggcgcagcggtcgggctgaacggggggttcgtgcacacagcccagcttggagcgaacgacctacaccgaactgagatacctacagcgtgagctatgagaaagcgccacgcttcccgaagggagaaaggcggacaggtatccggtaagcggcagggtcggaacaggagagcgcacgagggagcttccagggggaaacgcctggtatctttatagtcctgtcgggtttcgccacctctgacttgagcgtcgatttttgtgatgctcgtcaggggggcggagcctatggaaaaacgccagcaacgcggcctttttacgg

SEQ ID NO: 659 - DNA, 8216 bp, Artificial Sequence
  pCzSV5F(G105A)-I-T-BB3
ttcctattattaatagtaatcaattacggggtcattagttcatagcccatatatggagttccgcgttacataacttacggtaaatggcccgcctggctgaccgcccaacgacccccgcccattgacgtcaataatgacgtatgttcccatagtaacgccaatagggactttccattgacgtcaatgggtggagtatttacggtaaactgcccacttggcagtacatcaagtgtatcatatgccaagtacgccccctattgacgtcaatgacggtaaatggcccgcctggcattatgcccagtacatgaccttatgggactttcctacttggcagtacatctacgtattagtcatcgctattaccatggtgatgcggttttggcagtacatcaatgggcgtggatagcggtttgactcacggggatttccaagtctccaccccattgacgtcaatgggagtttgttttggcaccaaaatcaacgggactttccaaaatgtcgtaacaactccgccccattgacgcaaatgggcggtaggcgtgtacggtgggaggtctatataagcagagctggtttagtgaaccgtcagatccgctagctagaccatggggactattattcaatttctggtggtcagctgtctgctggctggggcaggatctctggaccctgctgccctcatgcagattggggtgattcctaccaatgtcaggcagctcatgtattatacagaagcttcttctgcctttattgttgtgaagctgatgcctactatagacagtcccatctctggctgtaacattacttcaataagttcctataatgcaactgtgactaagctgctccagcccataggggaaaatctggaaactataagaaaccagctgattcctacaagaaggagaaggagatttgctgcagttgtgattgggctggctgccctgggtgtggctacagcagcacaagtgacagctgcagtggccctggtcaaagcaaatgagaatgcagctgccatcctgaatctcaagaatgccatccagaagactaatgctgcagttgctgatgtggtgcaagccacacaatctctgggcacagcagtgcaagcagtgcaggatcatatcaactctgttgtgagcccagcaattacagctgccaactgtaaagcacaagatgccatcattggtagcatactcaatctgtatctgactgagctgaccacaatctttcacaaccagattaccaacccagccctgtctccaattaccatccaggccctcaggatactgctgggctctacactgcccactgtggttgaaaagagctttaatacccagatcagtgcagctgagctgctgtcttctggactcctgacagggcagattgttgggctggacctcacctacatgcagatggttatcaagattgaactgcctacactgactgttcagcctgccactcagattattgatctggcaacaatttcagcctttatcaataaccaggaagtgatggctcagctcccaacaagggttatggtgactggcagtctgatacaggcataccctgccagccagtgcaccataacacccaatacagtgtattgcaggtacaatgatgcccaggtgctgtctgatgacacaatggcctgcctgcaggggaatctgactaggtgcacttttagtccagtggtgggcagctttctgactaggtttgtgctgtttgatggcatagtctatgccaactgcaggtccatgctctgcaaatgcatgcagcctgcagcagttattctgcagccaagtagcagtccagtgacagtgatagacatgtataagtgtgtttctctgcaactggacaacctgaggttcaccatcactcagctggcaaatgttacttacaactcaactattaaactggagtcaagtcagattctgagcattgaccctctggatatctcccagaatctggctgcagtgaataagagcctcagtgatgcactccaacatctggcccagtcagacacctatctctcagccattacctctgcaactaccacctcagtcctgagcattatagctatatgtctgggatcactgggcctgattctgatcatactgctgagtgttgtggtgtggaagctgctgacaattgtggtggccaacaggaataggatggaaaattttgtgtaccacaaatagggatccgcccctctccctcccccccccctaacgttactggccgaagccgcttggaataaggccggtgtgcgtttgtctatatgttattttccaccatattgccgtcttttggcaatgtgagggcccggaaacctggccctgtcttcttgacgagcattcctaggggtctttcccctctcgccaaaggaatgcaaggtctgttgaatgtcgtgaaggaagcagttcctctggaagcttcttgaagacaaacaacgtctgtagcgaccctttgcaggcagcggaaccccccacctggcgacaggtgcctctgcggccaaaagccacgtgtataagatacacctgcaaaggcggcacaaccccagtgccacgttgtgagttggatagttgtggaaagagtcaaatggctctcctcaagcgtattcaacaaggggctgaaggatgcccagaaggtaccccattgtatgggatctgatctggggcctcggtgcacatgctttacatgtgtttagtcgaggttaaaaaaacgtctaggccccccgaaccacggggacgtggttttcctttgaaaaacacgatgataatatggccacaaccatggacaaagtgctgaatagggaggaaagtctgcaactgatggatctgttgggacttgagaggtctgcatggggtaatatcccacttatgaggaaagcatacctgaagaagtgtaaagagttccatcctgacaaaggtggagatgaagagaagatgaaaaagatgaacacactgtataagaaaatggaagatggtgtaaagtatgctcaccagccagattttggaggtttttgggatgccacagagatacctacttatggtacagatgagtgggaacagtggtggaatgcatttaatgaagagaatttgttttgctctgaggaaatgcctagttctgatgatgaggccacagctgactcccagcacagtactccacccaagaaaaagagaaaagtggaagacccaaaggatttcccctctgaactcttgtccttcttgtctcatgcagtgttctcaaataggaccctggcttgctttgctatctacactactaaggagaaggcagctctcttgtacaagaaaatcatggaaaagtattctgtcacctttatttccaggcacaactcctataatcataatattctctttttcttgacaccccataggcatagggtgagtgcaattaacaactatgctcagaagttgtgtactttctccttcctgatctgtaagggtgtgaataaggagtatctcatgtattcagccctgaccagagacccctttagtgtgattgaagaatccctgcctggtgggctcaaggagcatgatttcaacccagaagaggctgaagaaacaaaacaggtgagctggaagcttgtgactgaatatgcaatggagacaaagtgtgatgatgtcctgctcctcctgggaatgtacctggaatttcagtatagctttgaaatgtgtctgaaatgtatcaaaaaggaacagccttctcattataagtatcatgaaaagcactatgccaatgcagctatatttgcagattctaaaaaccagaaaaccatttgtcagcaagctgttgacacagttctggccaagaaaagagtagactctctccagcttaccagggagcagatgttgacaaataggttcaatgaccttctggacagaatggacataatgtttggctcaactggatctgcagatatagaggagtggatggctggagtggcctggctgcactgtctcctccctaaaatggacagtgtagtctatgacttccttaagtgtatggtctataatatccctaaaaagagatactggttgttcaagggacccattgattcagggaaaactacccttgctgctgcacttctggaactctgtggtgggaaagctctcaatgtcaacctgccacttgatagactcaactttgagctgggggtggcaattgatcagtttttggtagtgtttgaagatgtgaaaggtacaggaggagagtccagggatttgcctagtggccaaggcatcaacaatctggacaacctcagagactacctggatgggtctgtaaaggtcaaccttgaaaaaaagcatctcaacaagaggactcaaatatttccacctggaatagtcactatgaatgaatattcagtgcccaagaccctccaggctagatttgtcaagcaaattgatttcagacctaaagattatctgaaacattgtttggagaggagtgagttcctccttgagaaaaggattattcagtcaggaatagcactgcttcttatgctgatatggtatagaccagtggctgagtttgcccaaagcattcagagtagaatagttgagtggaaagaaaggcttgacaaggagttttctctttcagtatatcaaaagatgaagttcaatgtggctatgggtattggagtgcttgattggttgagaaacagtgatgatgatgatgaagattctcaggaaaatgctgataaaaatgaggatgggggagagaagaatatggaagattctggtcatgaaactggcattgatagtcagagccaggggagtttccaggctccacagagctcccaaagtgtccatgaccacaaccagccttaccatatatgcagaggttttacttgtttcaagaaacctcccactccccctccagaacctgaaacatgagcggccgcgactctagatcataatcagccataccacacctccccctgaacctgaaaaatcaatgcaattattgttgaaataaagcacccagcaatgcctgggaccatgtaaaactgtcctggttctttccaaggtatagagcatagcccacaggctgatatttctggccagggttggttggaggacagccttgtctataggaagagaatgaggtttttgcactataagggcatgcaagtcagtcccgcccctaactccacctggttgcccatcccgcccctaactccgcccagttccgcccattctccgccccatggctgactaattttttttatttatgcagaggcggaggccgcctcggcctctgagctattccagaagtagtgaggaggcttttttggaggcccttaattaaattgacatatctacctaatttgtgtataataaccctgataaatgcttcaataatattgaaaaaggaagagtcctgtataaaaagaaccagctgtggaatgtgtgtcagttagtaggcttatgcaaagtagcccgcccaagagacaggctgaggcccgcccaccatgatagaacaagatggacttcatgctggatctcctgcagcatgggtggaaagactttttggttatgattgggctcagcagaccattggatgttctgatgctgctgtgttcaggcttagtgcacagggtaggccagtgctctttgtgaagactgatctctctggagctttgaatgaactgcaggatgaggctgctaggctttcatggctggccaccacaggtgtcccttgtgctgcagtgttggatgtggttactgaggctgggagggattggctcctcctgggagaagtgccaggtcaggatctgttgagttctcacctggctccagctgaaaaagtctccataatggcagatgctatgagaaggctgcacacattggacccagctacatgcccatttgaccatcaggccaaacacaggattgagagggccagaacaagaatggaggctgggttggtggaccaggatgaccttgatgaggagcatcagggcctggctccagctgaattgtttgccaggctcaaggctagtatgcctgatggggaggatctggtggtaactcatggtgatgcctgtttgcctaacatcatggtggaaaatggaaggttctctggattcattgattgtggaagactgggtgtagctgacaggtatcaggacatagctcttgcaacaagggatattgcagaggagttgggtggagaatgggctgacaggttcctggtcttgtatggcattgctgccccagacagccaaagaattgctttctataggctgttggatgagtttttctaagctcagcacccacaaagctctcaggtcctaagagacactggcacccatatccatgcatcccttgtataaataaagcatccagcaaagctggtaccatgtaaaactgtcttggttgtttccaaggtatagagcatagctcaataggtttttgactttgtcccgcccctctaagtcctgcacacagatactccaatatgacatacagcatgcttgggaactgagtgcccccatgtgggcagagagcaccatgtgccacagtccctgagaagttcttgggaagggtgggcaattgccatgtgtgcctagagaaggttgtttgtaatactgccaagtgccatgtggtgtgatattggctccatgtgccttgtttgtaataacatttccatgtgtcttgggaagaaccatatataagcagagctggtttagtgaaccctcagataggcctagaccatggccagcagtgagaatgtcataacagagttcatgagattcaaggtgaggatggagggaactgtcaatggtcatgagtttgagattgaaggggaaggggagggcagaccctatgagggccacaacacagtcaaattgaaggtgaccaaagggggaccccttccctttgcctgggacatcctgagcccacagtttcagtatggttccaaagtttatgtaaagcaccctgctgacatccctgactacaagaaactgtccttcccagaaggattcaagtgggaaagggtcatgaactttgaggatggaggggttgcaacagtgacccaggacagttctctccaagatggctgtttcatctacaaggtaaaattcattggtgtgaactttccctctgatggcccagtgatgcaaaaaaagaccatgggctgggaagcctcaacagaaaggctgtaccctagagatggagttctcaagggtgagacccacaaagctctaaagctcaaagatgggggccactatctggtggagttcaagagcatctacatggcaaaaaagccagtgcagttgcctggctattactatgtggatgccaagcttgacataacctcacacaatgaagactacactattgtggaacagtatgagaggactgagggaagacatcatctgtttctgtgaattcgcactgcatggacttacctgcctggtggtatcagtcacaggctctgataaggattcagctgttgtataaataaagcatgcagcctagcaggaaccatgttaatctctcttggttgtttccttggaatactcctaagcacattaggtttttagatctgtagaaaagatcaaaggatcttcttgagatcctttttttctgcgcgtaatctgctgcttgcaaacaaaaaaaccaccgctaccagcggtggtttgtttgccggatcaagagctaccaactctttttccgaaggtaactggcttcagcagagcgcagataccaaatactgtccttctagtgtagccgtagttaggccaccacttcaagaactctgtagcaccgcctacatacctcgctctgctaatcctgttaccagtggctgctgccagtggcgataagtcgtgtcttaccgggttggactcaagacgatagttaccggataaggcgcagcggtcgggctgaacggggggttcgtgcacacagcccagcttggagcgaacgacctacaccgaactgagatacctacagcgtgagctatgagaaagcgccacgcttcccgaagggagaaaggcggacaggtatccggtaagcggcagggtcggaacaggagagcgcacgagggagcttccagggggaaacgcctggtatctttatagtcctgtcgggtttcgccacctctgacttgagcgtcgatttttgtgatgctcgtcaggggggcggagcctatggaaaaacgccagcaacgcggcctttttacgg

SEQ ID NO: 660 - DNA, 8216 bp, Artificial Sequence
  pCzSV5F(G109A)-I-T-BB3
ttcctattattaatagtaatcaattacggggtcattagttcatagcccatatatggagttccgcgttacataacttacggtaaatggcccgcctggctgaccgcccaacgacccccgcccattgacgtcaataatgacgtatgttcccatagtaacgccaatagggactttccattgacgtcaatgggtggagtatttacggtaaactgcccacttggcagtacatcaagtgtatcatatgccaagtacgccccctattgacgtcaatgacggtaaatggcccgcctggcattatgcccagtacatgaccttatgggactttcctacttggcagtacatctacgtattagtcatcgctattaccatggtgatgcggttttggcagtacatcaatgggcgtggatagcggtttgactcacggggatttccaagtctccaccccattgacgtcaatgggagtttgttttggcaccaaaatcaacgggactttccaaaatgtcgtaacaactccgccccattgacgcaaatgggcggtaggcgtgtacggtgggaggtctatataagcagagctggtttagtgaaccgtcagatccgctagctagaccatggggactattattcaatttctggtggtcagctgtctgctggctggggcaggatctctggaccctgctgccctcatgcagattggggtgattcctaccaatgtcaggcagctcatgtattatacagaagcttcttctgcctttattgttgtgaagctgatgcctactatagacagtcccatctctggctgtaacattacttcaataagttcctataatgcaactgtgactaagctgctccagcccataggggaaaatctggaaactataagaaaccagctgattcctacaagaaggagaaggagatttgctggagttgtgattgccctggctgccctgggtgtggctacagcagcacaagtgacagctgcagtggccctggtcaaagcaaatgagaatgcagctgccatcctgaatctcaagaatgccatccagaagactaatgctgcagttgctgatgtggtgcaagccacacaatctctgggcacagcagtgcaagcagtgcaggatcatatcaactctgttgtgagcccagcaattacagctgccaactgtaaagcacaagatgccatcattggtagcatactcaatctgtatctgactgagctgaccacaatctttcacaaccagattaccaacccagccctgtctccaattaccatccaggccctcaggatactgctgggctctacactgcccactgtggttgaaaagagctttaatacccagatcagtgcagctgagctgctgtcttctggactcctgacagggcagattgttgggctggacctcacctacatgcagatggttatcaagattgaactgcctacactgactgttcagcctgccactcagattattgatctggcaacaatttcagcctttatcaataaccaggaagtgatggctcagctcccaacaagggttatggtgactggcagtctgatacaggcataccctgccagccagtgcaccataacacccaatacagtgtattgcaggtacaatgatgcccaggtgctgtctgatgacacaatggcctgcctgcaggggaatctgactaggtgcacttttagtccagtggtgggcagctttctgactaggtttgtgctgtttgatggcatagtctatgccaactgcaggtccatgctctgcaaatgcatgcagcctgcagcagttattctgcagccaagtagcagtccagtgacagtgatagacatgtataagtgtgtttctctgcaactggacaacctgaggttcaccatcactcagctggcaaatgttacttacaactcaactattaaactggagtcaagtcagattctgagcattgaccctctggatatctcccagaatctggctgcagtgaataagagcctcagtgatgcactccaacatctggcccagtcagacacctatctctcagccattacctctgcaactaccacctcagtcctgagcattatagctatatgtctgggatcactgggcctgattctgatcatactgctgagtgttgtggtgtggaagctgctgacaattgtggtggccaacaggaataggatggaaaattttgtgtaccacaaatagggatccgcccctctccctcccccccccctaacgttactggccgaagccgcttggaataaggccggtgtgcgtttgtctatatgttattttccaccatattgccgtcttttggcaatgtgagggcccggaaacctggccctgtcttcttgacgagcattcctaggggtctttcccctctcgccaaaggaatgcaaggtctgttgaatgtcgtgaaggaagcagttcctctggaagcttcttgaagacaaacaacgtctgtagcgaccctttgcaggcagcggaaccccccacctggcgacaggtgcctctgcggccaaaagccacgtgtataagatacacctgcaaaggcggcacaaccccagtgccacgttgtgagttggatagttgtggaaagagtcaaatggctctcctcaagcgtattcaacaaggggctgaaggatgcccagaaggtaccccattgtatgggatctgatctggggcctcggtgcacatgctttacatgtgtttagtcgaggttaaaaaaacgtctaggccccccgaaccacggggacgtggttttcctttgaaaaacacgatgataatatggccacaaccatggacaaagtgctgaatagggaggaaagtctgcaactgatggatctgttgggacttgagaggtctgcatggggtaatatcccacttatgaggaaagcatacctgaagaagtgtaaagagttccatcctgacaaaggtggagatgaagagaagatgaaaaagatgaacacactgtataagaaaatggaagatggtgtaaagtatgctcaccagccagattttggaggtttttgggatgccacagagatacctacttatggtacagatgagtgggaacagtggtggaatgcatttaatgaagagaatttgttttgctctgaggaaatgcctagttctgatgatgaggccacagctgactcccagcacagtactccacccaagaaaaagagaaaagtggaagacccaaaggatttcccctctgaactcttgtccttcttgtctcatgcagtgttctcaaataggaccctggcttgctttgctatctacactactaaggagaaggcagctctcttgtacaagaaaatcatggaaaagtattctgtcacctttatttccaggcacaactcctataatcataatattctctttttcttgacaccccataggcatagggtgagtgcaattaacaactatgctcagaagttgtgtactttctccttcctgatctgtaagggtgtgaataaggagtatctcatgtattcagccctgaccagagacccctttagtgtgattgaagaatccctgcctggtgggctcaaggagcatgatttcaacccagaagaggctgaagaaacaaaacaggtgagctggaagcttgtgactgaatatgcaatggagacaaagtgtgatgatgtcctgctcctcctgggaatgtacctggaatttcagtatagctttgaaatgtgtctgaaatgtatcaaaaaggaacagccttctcattataagtatcatgaaaagcactatgccaatgcagctatatttgcagattctaaaaaccagaaaaccatttgtcagcaagctgttgacacagttctggccaagaaaagagtagactctctccagcttaccagggagcagatgttgacaaataggttcaatgaccttctggacagaatggacataatgtttggctcaactggatctgcagatatagaggagtggatggctggagtggcctggctgcactgtctcctccctaaaatggacagtgtagtctatgacttccttaagtgtatggtctataatatccctaaaaagagatactggttgttcaagggacccattgattcagggaaaactacccttgctgctgcacttctggaactctgtggtgggaaagctctcaatgtcaacctgccacttgatagactcaactttgagctgggggtggcaattgatcagtttttggtagtgtttgaagatgtgaaaggtacaggaggagagtccagggatttgcctagtggccaaggcatcaacaatctggacaacctcagagactacctggatgggtctgtaaaggtcaaccttgaaaaaaagcatctcaacaagaggactcaaatatttccacctggaatagtcactatgaatgaatattcagtgcccaagaccctccaggctagatttgtcaagcaaattgatttcagacctaaagattatctgaaacattgtttggagaggagtgagttcctccttgagaaaaggattattcagtcaggaatagcactgcttcttatgctgatatggtatagaccagtggctgagtttgcccaaagcattcagagtagaatagttgagtggaaagaaaggcttgacaaggagttttctctttcagtatatcaaaagatgaagttcaatgtggctatgggtattggagtgcttgattggttgagaaacagtgatgatgatgatgaagattctcaggaaaatgctgataaaaatgaggatgggggagagaagaatatggaagattctggtcatgaaactggcattgatagtcagagccaggggagtttccaggctccacagagctcccaaagtgtccatgaccacaaccagccttaccatatatgcagaggttttacttgtttcaagaaacctcccactccccctccagaacctgaaacatgagcggccgcgactctagatcataatcagccataccacacctccccctgaacctgaaaaatcaatgcaattattgttgaaataaagcacccagcaatgcctgggaccatgtaaaactgtcctggttctttccaaggtatagagcatagcccacaggctgatatttctggccagggttggttggaggacagccttgtctataggaagagaatgaggtttttgcactataagggcatgcaagtcagtcccgcccctaactccacctggttgcccatcccgcccctaactccgcccagttccgcccattctccgccccatggctgactaattttttttatttatgcagaggcggaggccgcctcggcctctgagctattccagaagtagtgaggaggcttttttggaggcccttaattaaattgacatatctacctaatttgtgtataataaccctgataaatgcttcaataatattgaaaaaggaagagtcctgtataaaaagaaccagctgtggaatgtgtgtcagttagtaggcttatgcaaagtagcccgcccaagagacaggctgaggcccgcccaccatgatagaacaagatggacttcatgctggatctcctgcagcatgggtggaaagactttttggttatgattgggctcagcagaccattggatgttctgatgctgctgtgttcaggcttagtgcacagggtaggccagtgctctttgtgaagactgatctctctggagctttgaatgaactgcaggatgaggctgctaggctttcatggctggccaccacaggtgtcccttgtgctgcagtgttggatgtggttactgaggctgggagggattggctcctcctgggagaagtgccaggtcaggatctgttgagttctcacctggctccagctgaaaaagtctccataatggcagatgctatgagaaggctgcacacattggacccagctacatgcccatttgaccatcaggccaaacacaggattgagagggccagaacaagaatggaggctgggttggtggaccaggatgaccttgatgaggagcatcagggcctggctccagctgaattgtttgccaggctcaaggctagtatgcctgatggggaggatctggtggtaactcatggtgatgcctgtttgcctaacatcatggtggaaaatggaaggttctctggattcattgattgtggaagactgggtgtagctgacaggtatcaggacatagctcttgcaacaagggatattgcagaggagttgggtggagaatgggctgacaggttcctggtcttgtatggcattgctgccccagacagccaaagaattgctttctataggctgttggatgagtttttctaagctcagcacccacaaagctctcaggtcctaagagacactggcacccatatccatgcatcccttgtataaataaagcatccagcaaagctggtaccatgtaaaactgtcttggttgtttccaaggtatagagcatagctcaataggtttttgactttgtcccgcccctctaagtcctgcacacagatactccaatatgacatacagcatgcttgggaactgagtgcccccatgtgggcagagagcaccatgtgccacagtccctgagaagttcttgggaagggtgggcaattgccatgtgtgcctagagaaggttgtttgtaatactgccaagtgccatgtggtgtgatattggctccatgtgccttgtttgtaataacatttccatgtgtcttgggaagaaccatatataagcagagctggtttagtgaaccctcagataggcctagaccatggccagcagtgagaatgtcataacagagttcatgagattcaaggtgaggatggagggaactgtcaatggtcatgagtttgagattgaaggggaaggggagggcagaccctatgagggccacaacacagtcaaattgaaggtgaccaaagggggaccccttccctttgcctgggacatcctgagcccacagtttcagtatggttccaaagtttatgtaaagcaccctgctgacatccctgactacaagaaactgtccttcccagaaggattcaagtgggaaagggtcatgaactttgaggatggaggggttgcaacagtgacccaggacagttctctccaagatggctgtttcatctacaaggtaaaattcattggtgtgaactttccctctgatggcccagtgatgcaaaaaaagaccatgggctgggaagcctcaacagaaaggctgtaccctagagatggagttctcaagggtgagacccacaaagctctaaagctcaaagatgggggccactatctggtggagttcaagagcatctacatggcaaaaaagccagtgcagttgcctggctattactatgtggatgccaagcttgacataacctcacacaatgaagactacactattgtggaacagtatgagaggactgagggaagacatcatctgtttctgtgaattcgcactgcatggacttacctgcctggtggtatcagtcacaggctctgataaggattcagctgttgtataaataaagcatgcagcctagcaggaaccatgttaatctctcttggttgtttccttggaatactcctaagcacattaggtttttagatctgtagaaaagatcaaaggatcttcttgagatcctttttttctgcgcgtaatctgctgcttgcaaacaaaaaaaccaccgctaccagcggtggtttgtttgccggatcaagagctaccaactctttttccgaaggtaactggcttcagcagagcgcagataccaaatactgtccttctagtgtagccgtagttaggccaccacttcaagaactctgtagcaccgcctacatacctcgctctgctaatcctgttaccagtggctgctgccagtggcgataagtcgtgtcttaccgggttggactcaagacgatagttaccggataaggcgcagcggtcgggctgaacggggggttcgtgcacacagcccagcttggagcgaacgacctacaccgaactgagatacctacagcgtgagctatgagaaagcgccacgcttcccgaagggagaaaggcggacaggtatccggtaagcggcagggtcggaacaggagagcgcacgagggagcttccagggggaaacgcctggtatctttatagtcctgtcgggtttcgccacctctgacttgagcgtcgatttttgtgatgctcgtcaggggggcggagcctatggaaaaacgccagcaacgcggcctttttacgg

SEQ ID NO: 661 - DNA, 8216 bp, Artificial Sequence
  pCzSV5F(G114A)-I-T-BB3
ttcctattattaatagtaatcaattacggggtcattagttcatagcccatatatggagttccgcgttacataacttacggtaaatggcccgcctggctgaccgcccaacgacccccgcccattgacgtcaataatgacgtatgttcccatagtaacgccaatagggactttccattgacgtcaatgggtggagtatttacggtaaactgcccacttggcagtacatcaagtgtatcatatgccaagtacgccccctattgacgtcaatgacggtaaatggcccgcctggcattatgcccagtacatgaccttatgggactttcctacttggcagtacatctacgtattagtcatcgctattaccatggtgatgcggttttggcagtacatcaatgggcgtggatagcggtttgactcacggggatttccaagtctccaccccattgacgtcaatgggagtttgttttggcaccaaaatcaacgggactttccaaaatgtcgtaacaactccgccccattgacgcaaatgggcggtaggcgtgtacggtgggaggtctatataagcagagctggtttagtgaaccgtcagatccgctagctagaccatggggactattattcaatttctggtggtcagctgtctgctggctggggcaggatctctggaccctgctgccctcatgcagattggggtgattcctaccaatgtcaggcagctcatgtattatacagaagcttcttctgcctttattgttgtgaagctgatgcctactatagacagtcccatctctggctgtaacattacttcaataagttcctataatgcaactgtgactaagctgctccagcccataggggaaaatctggaaactataagaaaccagctgattcctacaagaaggagaaggagatttgctggagttgtgattgggctggctgccctggctgtggctacagcagcacaagtgacagctgcagtggccctggtcaaagcaaatgagaatgcagctgccatcctgaatctcaagaatgccatccagaagactaatgctgcagttgctgatgtggtgcaagccacacaatctctgggcacagcagtgcaagcagtgcaggatcatatcaactctgttgtgagcccagcaattacagctgccaactgtaaagcacaagatgccatcattggtagcatactcaatctgtatctgactgagctgaccacaatctttcacaaccagattaccaacccagccctgtctccaattaccatccaggccctcaggatactgctgggctctacactgcccactgtggttgaaaagagctttaatacccagatcagtgcagctgagctgctgtcttctggactcctgacagggcagattgttgggctggacctcacctacatgcagatggttatcaagattgaactgcctacactgactgttcagcctgccactcagattattgatctggcaacaatttcagcctttatcaataaccaggaagtgatggctcagctcccaacaagggttatggtgactggcagtctgatacaggcataccctgccagccagtgcaccataacacccaatacagtgtattgcaggtacaatgatgcccaggtgctgtctgatgacacaatggcctgcctgcaggggaatctgactaggtgcacttttagtccagtggtgggcagctttctgactaggtttgtgctgtttgatggcatagtctatgccaactgcaggtccatgctctgcaaatgcatgcagcctgcagcagttattctgcagccaagtagcagtccagtgacagtgatagacatgtataagtgtgtttctctgcaactggacaacctgaggttcaccatcactcagctggcaaatgttacttacaactcaactattaaactggagtcaagtcagattctgagcattgaccctctggatatctcccagaatctggctgcagtgaataagagcctcagtgatgcactccaacatctggcccagtcagacacctatctctcagccattacctctgcaactaccacctcagtcctgagcattatagctatatgtctgggatcactgggcctgattctgatcatactgctgagtgttgtggtgtggaagctgctgacaattgtggtggccaacaggaataggatggaaaattttgtgtaccacaaatagggatccgcccctctccctcccccccccctaacgttactggccgaagccgcttggaataaggccggtgtgcgtttgtctatatgttattttccaccatattgccgtcttttggcaatgtgagggcccggaaacctggccctgtcttcttgacgagcattcctaggggtctttcccctctcgccaaaggaatgcaaggtctgttgaatgtcgtgaaggaagcagttcctctggaagcttcttgaagacaaacaacgtctgtagcgaccctttgcaggcagcggaaccccccacctggcgacaggtgcctctgcggccaaaagccacgtgtataagatacacctgcaaaggcggcacaaccccagtgccacgttgtgagttggatagttgtggaaagagtcaaatggctctcctcaagcgtattcaacaaggggctgaaggatgcccagaaggtaccccattgtatgggatctgatctggggcctcggtgcacatgctttacatgtgtttagtcgaggttaaaaaaacgtctaggccccccgaaccacggggacgtggttttcctttgaaaaacacgatgataatatggccacaaccatggacaaagtgctgaatagggaggaaagtctgcaactgatggatctgttgggacttgagaggtctgcatggggtaatatcccacttatgaggaaagcatacctgaagaagtgtaaagagttccatcctgacaaaggtggagatgaagagaagatgaaaaagatgaacacactgtataagaaaatggaagatggtgtaaagtatgctcaccagccagattttggaggtttttgggatgccacagagatacctacttatggtacagatgagtgggaacagtggtggaatgcatttaatgaagagaatttgttttgctctgaggaaatgcctagttctgatgatgaggccacagctgactcccagcacagtactccacccaagaaaaagagaaaagtggaagacccaaaggatttcccctctgaactcttgtccttcttgtctcatgcagtgttctcaaataggaccctggcttgctttgctatctacactactaaggagaaggcagctctcttgtacaagaaaatcatggaaaagtattctgtcacctttatttccaggcacaactcctataatcataatattctctttttcttgacaccccataggcatagggtgagtgcaattaacaactatgctcagaagttgtgtactttctccttcctgatctgtaagggtgtgaataaggagtatctcatgtattcagccctgaccagagacccctttagtgtgattgaagaatccctgcctggtgggctcaaggagcatgatttcaacccagaagaggctgaagaaacaaaacaggtgagctggaagcttgtgactgaatatgcaatggagacaaagtgtgatgatgtcctgctcctcctgggaatgtacctggaatttcagtatagctttgaaatgtgtctgaaatgtatcaaaaaggaacagccttctcattataagtatcatgaaaagcactatgccaatgcagctatatttgcagattctaaaaaccagaaaaccatttgtcagcaagctgttgacacagttctggccaagaaaagagtagactctctccagcttaccagggagcagatgttgacaaataggttcaatgaccttctggacagaatggacataatgtttggctcaactggatctgcagatatagaggagtggatggctggagtggcctggctgcactgtctcctccctaaaatggacagtgtagtctatgacttccttaagtgtatggtctataatatccctaaaaagagatactggttgttcaagggacccattgattcagggaaaactacccttgctgctgcacttctggaactctgtggtgggaaagctctcaatgtcaacctgccacttgatagactcaactttgagctgggggtggcaattgatcagtttttggtagtgtttgaagatgtgaaaggtacaggaggagagtccagggatttgcctagtggccaaggcatcaacaatctggacaacctcagagactacctggatgggtctgtaaaggtcaaccttgaaaaaaagcatctcaacaagaggactcaaatatttccacctggaatagtcactatgaatgaatattcagtgcccaagaccctccaggctagatttgtcaagcaaattgatttcagacctaaagattatctgaaacattgtttggagaggagtgagttcctccttgagaaaaggattattcagtcaggaatagcactgcttcttatgctgatatggtatagaccagtggctgagtttgcccaaagcattcagagtagaatagttgagtggaaagaaaggcttgacaaggagttttctctttcagtatatcaaaagatgaagttcaatgtggctatgggtattggagtgcttgattggttgagaaacagtgatgatgatgatgaagattctcaggaaaatgctgataaaaatgaggatgggggagagaagaatatggaagattctggtcatgaaactggcattgatagtcagagccaggggagtttccaggctccacagagctcccaaagtgtccatgaccacaaccagccttaccatatatgcagaggttttacttgtttcaagaaacctcccactccccctccagaacctgaaacatgagcggccgcgactctagatcataatcagccataccacacctccccctgaacctgaaaaatcaatgcaattattgttgaaataaagcacccagcaatgcctgggaccatgtaaaactgtcctggttctttccaaggtatagagcatagcccacaggctgatatttctggccagggttggttggaggacagccttgtctataggaagagaatgaggtttttgcactataagggcatgcaagtcagtcccgcccctaactccacctggttgcccatcccgcccctaactccgcccagttccgcccattctccgccccatggctgactaattttttttatttatgcagaggcggaggccgcctcggcctctgagctattccagaagtagtgaggaggcttttttggaggcccttaattaaattgacatatctacctaatttgtgtataataaccctgataaatgcttcaataatattgaaaaaggaagagtcctgtataaaaagaaccagctgtggaatgtgtgtcagttagtaggcttatgcaaagtagcccgcccaagagacaggctgaggcccgcccaccatgatagaacaagatggacttcatgctggatctcctgcagcatgggtggaaagactttttggttatgattgggctcagcagaccattggatgttctgatgctgctgtgttcaggcttagtgcacagggtaggccagtgctctttgtgaagactgatctctctggagctttgaatgaactgcaggatgaggctgctaggctttcatggctggccaccacaggtgtcccttgtgctgcagtgttggatgtggttactgaggctgggagggattggctcctcctgggagaagtgccaggtcaggatctgttgagttctcacctggctccagctgaaaaagtctccataatggcagatgctatgagaaggctgcacacattggacccagctacatgcccatttgaccatcaggccaaacacaggattgagagggccagaacaagaatggaggctgggttggtggaccaggatgaccttgatgaggagcatcagggcctggctccagctgaattgtttgccaggctcaaggctagtatgcctgatggggaggatctggtggtaactcatggtgatgcctgtttgcctaacatcatggtggaaaatggaaggttctctggattcattgattgtggaagactgggtgtagctgacaggtatcaggacatagctcttgcaacaagggatattgcagaggagttgggtggagaatgggctgacaggttcctggtcttgtatggcattgctgccccagacagccaaagaattgctttctataggctgttggatgagtttttctaagctcagcacccacaaagctctcaggtcctaagagacactggcacccatatccatgcatcccttgtataaataaagcatccagcaaagctggtaccatgtaaaactgtcttggttgtttccaaggtatagagcatagctcaataggtttttgactttgtcccgcccctctaagtcctgcacacagatactccaatatgacatacagcatgcttgggaactgagtgcccccatgtgggcagagagcaccatgtgccacagtccctgagaagttcttgggaagggtgggcaattgccatgtgtgcctagagaaggttgtttgtaatactgccaagtgccatgtggtgtgatattggctccatgtgccttgtttgtaataacatttccatgtgtcttgggaagaaccatatataagcagagctggtttagtgaaccctcagataggcctagaccatggccagcagtgagaatgtcataacagagttcatgagattcaaggtgaggatggagggaactgtcaatggtcatgagtttgagattgaaggggaaggggagggcagaccctatgagggccacaacacagtcaaattgaaggtgaccaaagggggaccccttccctttgcctgggacatcctgagcccacagtttcagtatggttccaaagtttatgtaaagcaccctgctgacatccctgactacaagaaactgtccttcccagaaggattcaagtgggaaagggtcatgaactttgaggatggaggggttgcaacagtgacccaggacagttctctccaagatggctgtttcatctacaaggtaaaattcattggtgtgaactttccctctgatggcccagtgatgcaaaaaaagaccatgggctgggaagcctcaacagaaaggctgtaccctagagatggagttctcaagggtgagacccacaaagctctaaagctcaaagatgggggccactatctggtggagttcaagagcatctacatggcaaaaaagccagtgcagttgcctggctattactatgtggatgccaagcttgacataacctcacacaatgaagactacactattgtggaacagtatgagaggactgagggaagacatcatctgtttctgtgaattcgcactgcatggacttacctgcctggtggtatcagtcacaggctctgataaggattcagctgttgtataaataaagcatgcagcctagcaggaaccatgttaatctctcttggttgtttccttggaatactcctaagcacattaggtttttagatctgtagaaaagatcaaaggatcttcttgagatcctttttttctgcgcgtaatctgctgcttgcaaacaaaaaaaccaccgctaccagcggtggtttgtttgccggatcaagagctaccaactctttttccgaaggtaactggcttcagcagagcgcagataccaaatactgtccttctagtgtagccgtagttaggccaccacttcaagaactctgtagcaccgcctacatacctcgctctgctaatcctgttaccagtggctgctgccagtggcgataagtcgtgtcttaccgggttggactcaagacgatagttaccggataaggcgcagcggtcgggctgaacggggggttcgtgcacacagcccagcttggagcgaacgacctacaccgaactgagatacctacagcgtgagctatgagaaagcgccacgcttcccgaagggagaaaggcggacaggtatccggtaagcggcagggtcggaacaggagagcgcacgagggagcttccagggggaaacgcctggtatctttatagtcctgtcgggtttcgccacctctgacttgagcgtcgatttttgtgatgctcgtcaggggggcggagcctatggaaaaacgccagcaacgcggcctttttacgg

SEQ ID NO: 662 - DNA, 8216 bp, Artificial Sequence
  pCzSV5F(G105A/G109A)-I-T-BB3
ttcctattattaatagtaatcaattacggggtcattagttcatagcccatatatggagttccgcgttacataacttacggtaaatggcccgcctggctgaccgcccaacgacccccgcccattgacgtcaataatgacgtatgttcccatagtaacgccaatagggactttccattgacgtcaatgggtggagtatttacggtaaactgcccacttggcagtacatcaagtgtatcatatgccaagtacgccccctattgacgtcaatgacggtaaatggcccgcctggcattatgcccagtacatgaccttatgggactttcctacttggcagtacatctacgtattagtcatcgctattaccatggtgatgcggttttggcagtacatcaatgggcgtggatagcggtttgactcacggggatttccaagtctccaccccattgacgtcaatgggagtttgttttggcaccaaaatcaacgggactttccaaaatgtcgtaacaactccgccccattgacgcaaatgggcggtaggcgtgtacggtgggaggtctatataagcagagctggtttagtgaaccgtcagatccgctagctagaccatggggactattattcaatttctggtggtcagctgtctgctggctggggcaggatctctggaccctgctgccctcatgcagattggggtgattcctaccaatgtcaggcagctcatgtattatacagaagcttcttctgcctttattgttgtgaagctgatgcctactatagacagtcccatctctggctgtaacattacttcaataagttcctataatgcaactgtgactaagctgctccagcccataggggaaaatctggaaactataagaaaccagctgattcctacaagaaggagaaggagatttgctgcagttgtgattgccctggctgccctgggtgtggctacagcagcacaagtgacagctgcagtggccctggtcaaagcaaatgagaatgcagctgccatcctgaatctcaagaatgccatccagaagactaatgctgcagttgctgatgtggtgcaagccacacaatctctgggcacagcagtgcaagcagtgcaggatcatatcaactctgttgtgagcccagcaattacagctgccaactgtaaagcacaagatgccatcattggtagcatactcaatctgtatctgactgagctgaccacaatctttcacaaccagattaccaacccagccctgtctccaattaccatccaggccctcaggatactgctgggctctacactgcccactgtggttgaaaagagctttaatacccagatcagtgcagctgagctgctgtcttctggactcctgacagggcagattgttgggctggacctcacctacatgcagatggttatcaagattgaactgcctacactgactgttcagcctgccactcagattattgatctggcaacaatttcagcctttatcaataaccaggaagtgatggctcagctcccaacaagggttatggtgactggcagtctgatacaggcataccctgccagccagtgcaccataacacccaatacagtgtattgcaggtacaatgatgcccaggtgctgtctgatgacacaatggcctgcctgcaggggaatctgactaggtgcacttttagtccagtggtgggcagctttctgactaggtttgtgctgtttgatggcatagtctatgccaactgcaggtccatgctctgcaaatgcatgcagcctgcagcagttattctgcagccaagtagcagtccagtgacagtgatagacatgtataagtgtgtttctctgcaactggacaacctgaggttcaccatcactcagctggcaaatgttacttacaactcaactattaaactggagtcaagtcagattctgagcattgaccctctggatatctcccagaatctggctgcagtgaataagagcctcagtgatgcactccaacatctggcccagtcagacacctatctctcagccattacctctgcaactaccacctcagtcctgagcattatagctatatgtctgggatcactgggcctgattctgatcatactgctgagtgttgtggtgtggaagctgctgacaattgtggtggccaacaggaataggatggaaaattttgtgtaccacaaatagggatccgcccctctccctcccccccccctaacgttactggccgaagccgcttggaataaggccggtgtgcgtttgtctatatgttattttccaccatattgccgtcttttggcaatgtgagggcccggaaacctggccctgtcttcttgacgagcattcctaggggtctttcccctctcgccaaaggaatgcaaggtctgttgaatgtcgtgaaggaagcagttcctctggaagcttcttgaagacaaacaacgtctgtagcgaccctttgcaggcagcggaaccccccacctggcgacaggtgcctctgcggccaaaagccacgtgtataagatacacctgcaaaggcggcacaaccccagtgccacgttgtgagttggatagttgtggaaagagtcaaatggctctcctcaagcgtattcaacaaggggctgaaggatgcccagaaggtaccccattgtatgggatctgatctggggcctcggtgcacatgctttacatgtgtttagtcgaggttaaaaaaacgtctaggccccccgaaccacggggacgtggttttcctttgaaaaacacgatgataatatggccacaaccatggacaaagtgctgaatagggaggaaagtctgcaactgatggatctgttgggacttgagaggtctgcatggggtaatatcccacttatgaggaaagcatacctgaagaagtgtaaagagttccatcctgacaaaggtggagatgaagagaagatgaaaaagatgaacacactgtataagaaaatggaagatggtgtaaagtatgctcaccagccagattttggaggtttttgggatgccacagagatacctacttatggtacagatgagtgggaacagtggtggaatgcatttaatgaagagaatttgttttgctctgaggaaatgcctagttctgatgatgaggccacagctgactcccagcacagtactccacccaagaaaaagagaaaagtggaagacccaaaggatttcccctctgaactcttgtccttcttgtctcatgcagtgttctcaaataggaccctggcttgctttgctatctacactactaaggagaaggcagctctcttgtacaagaaaatcatggaaaagtattctgtcacctttatttccaggcacaactcctataatcataatattctctttttcttgacaccccataggcatagggtgagtgcaattaacaactatgctcagaagttgtgtactttctccttcctgatctgtaagggtgtgaataaggagtatctcatgtattcagccctgaccagagacccctttagtgtgattgaagaatccctgcctggtgggctcaaggagcatgatttcaacccagaagaggctgaagaaacaaaacaggtgagctggaagcttgtgactgaatatgcaatggagacaaagtgtgatgatgtcctgctcctcctgggaatgtacctggaatttcagtatagctttgaaatgtgtctgaaatgtatcaaaaaggaacagccttctcattataagtatcatgaaaagcactatgccaatgcagctatatttgcagattctaaaaaccagaaaaccatttgtcagcaagctgttgacacagttctggccaagaaaagagtagactctctccagcttaccagggagcagatgttgacaaataggttcaatgaccttctggacagaatggacataatgtttggctcaactggatctgcagatatagaggagtggatggctggagtggcctggctgcactgtctcctccctaaaatggacagtgtagtctatgacttccttaagtgtatggtctataatatccctaaaaagagatactggttgttcaagggacccattgattcagggaaaactacccttgctgctgcacttctggaactctgtggtgggaaagctctcaatgtcaacctgccacttgatagactcaactttgagctgggggtggcaattgatcagtttttggtagtgtttgaagatgtgaaaggtacaggaggagagtccagggatttgcctagtggccaaggcatcaacaatctggacaacctcagagactacctggatgggtctgtaaaggtcaaccttgaaaaaaagcatctcaacaagaggactcaaatatttccacctggaatagtcactatgaatgaatattcagtgcccaagaccctccaggctagatttgtcaagcaaattgatttcagacctaaagattatctgaaacattgtttggagaggagtgagttcctccttgagaaaaggattattcagtcaggaatagcactgcttcttatgctgatatggtatagaccagtggctgagtttgcccaaagcattcagagtagaatagttgagtggaaagaaaggcttgacaaggagttttctctttcagtatatcaaaagatgaagttcaatgtggctatgggtattggagtgcttgattggttgagaaacagtgatgatgatgatgaagattctcaggaaaatgctgataaaaatgaggatgggggagagaagaatatggaagattctggtcatgaaactggcattgatagtcagagccaggggagtttccaggctccacagagctcccaaagtgtccatgaccacaaccagccttaccatatatgcagaggttttacttgtttcaagaaacctcccactccccctccagaacctgaaacatgagcggccgcgactctagatcataatcagccataccacacctccccctgaacctgaaaaatcaatgcaattattgttgaaataaagcacccagcaatgcctgggaccatgtaaaactgtcctggttctttccaaggtatagagcatagcccacaggctgatatttctggccagggttggttggaggacagccttgtctataggaagagaatgaggtttttgcactataagggcatgcaagtcagtcccgcccctaactccacctggttgcccatcccgcccctaactccgcccagttccgcccattctccgccccatggctgactaattttttttatttatgcagaggcggaggccgcctcggcctctgagctattccagaagtagtgaggaggcttttttggaggcccttaattaaattgacatatctacctaatttgtgtataataaccctgataaatgcttcaataatattgaaaaaggaagagtcctgtataaaaagaaccagctgtggaatgtgtgtcagttagtaggcttatgcaaagtagcccgcccaagagacaggctgaggcccgcccaccatgatagaacaagatggacttcatgctggatctcctgcagcatgggtggaaagactttttggttatgattgggctcagcagaccattggatgttctgatgctgctgtgttcaggcttagtgcacagggtaggccagtgctctttgtgaagactgatctctctggagctttgaatgaactgcaggatgaggctgctaggctttcatggctggccaccacaggtgtcccttgtgctgcagtgttggatgtggttactgaggctgggagggattggctcctcctgggagaagtgccaggtcaggatctgttgagttctcacctggctccagctgaaaaagtctccataatggcagatgctatgagaaggctgcacacattggacccagctacatgcccatttgaccatcaggccaaacacaggattgagagggccagaacaagaatggaggctgggttggtggaccaggatgaccttgatgaggagcatcagggcctggctccagctgaattgtttgccaggctcaaggctagtatgcctgatggggaggatctggtggtaactcatggtgatgcctgtttgcctaacatcatggtggaaaatggaaggttctctggattcattgattgtggaagactgggtgtagctgacaggtatcaggacatagctcttgcaacaagggatattgcagaggagttgggtggagaatgggctgacaggttcctggtcttgtatggcattgctgccccagacagccaaagaattgctttctataggctgttggatgagtttttctaagctcagcacccacaaagctctcaggtcctaagagacactggcacccatatccatgcatcccttgtataaataaagcatccagcaaagctggtaccatgtaaaactgtcttggttgtttccaaggtatagagcatagctcaataggtttttgactttgtcccgcccctctaagtcctgcacacagatactccaatatgacatacagcatgcttgggaactgagtgcccccatgtgggcagagagcaccatgtgccacagtccctgagaagttcttgggaagggtgggcaattgccatgtgtgcctagagaaggttgtttgtaatactgccaagtgccatgtggtgtgatattggctccatgtgccttgtttgtaataacatttccatgtgtcttgggaagaaccatatataagcagagctggtttagtgaaccctcagataggcctagaccatggccagcagtgagaatgtcataacagagttcatgagattcaaggtgaggatggagggaactgtcaatggtcatgagtttgagattgaaggggaaggggagggcagaccctatgagggccacaacacagtcaaattgaaggtgaccaaagggggaccccttccctttgcctgggacatcctgagcccacagtttcagtatggttccaaagtttatgtaaagcaccctgctgacatccctgactacaagaaactgtccttcccagaaggattcaagtgggaaagggtcatgaactttgaggatggaggggttgcaacagtgacccaggacagttctctccaagatggctgtttcatctacaaggtaaaattcattggtgtgaactttccctctgatggcccagtgatgcaaaaaaagaccatgggctgggaagcctcaacagaaaggctgtaccctagagatggagttctcaagggtgagacccacaaagctctaaagctcaaagatgggggccactatctggtggagttcaagagcatctacatggcaaaaaagccagtgcagttgcctggctattactatgtggatgccaagcttgacataacctcacacaatgaagactacactattgtggaacagtatgagaggactgagggaagacatcatctgtttctgtgaattcgcactgcatggacttacctgcctggtggtatcagtcacaggctctgataaggattcagctgttgtataaataaagcatgcagcctagcaggaaccatgttaatctctcttggttgtttccttggaatactcctaagcacattaggtttttagatctgtagaaaagatcaaaggatcttcttgagatcctttttttctgcgcgtaatctgctgcttgcaaacaaaaaaaccaccgctaccagcggtggtttgtttgccggatcaagagctaccaactctttttccgaaggtaactggcttcagcagagcgcagataccaaatactgtccttctagtgtagccgtagttaggccaccacttcaagaactctgtagcaccgcctacatacctcgctctgctaatcctgttaccagtggctgctgccagtggcgataagtcgtgtcttaccgggttggactcaagacgatagttaccggataaggcgcagcggtcgggctgaacggggggttcgtgcacacagcccagcttggagcgaacgacctacaccgaactgagatacctacagcgtgagctatgagaaagcgccacgcttcccgaagggagaaaggcggacaggtatccggtaagcggcagggtcggaacaggagagcgcacgagggagcttccagggggaaacgcctggtatctttatagtcctgtcgggtttcgccacctctgacttgagcgtcgatttttgtgatgctcgtcaggggggcggagcctatggaaaaacgccagcaacgcggcctttttacgg

SEQ ID NO: 663 - DNA, 8216 bp, Artificial Sequence
  pCzSV5F(G105A/G109A/G114A)-I-T-BB3
ttcctattattaatagtaatcaattacggggtcattagttcatagcccatatatggagttccgcgttacataacttacggtaaatggcccgcctggctgaccgcccaacgacccccgcccattgacgtcaataatgacgtatgttcccatagtaacgccaatagggactttccattgacgtcaatgggtggagtatttacggtaaactgcccacttggcagtacatcaagtgtatcatatgccaagtacgccccctattgacgtcaatgacggtaaatggcccgcctggcattatgcccagtacatgaccttatgggactttcctacttggcagtacatctacgtattagtcatcgctattaccatggtgatgcggttttggcagtacatcaatgggcgtggatagcggtttgactcacggggatttccaagtctccaccccattgacgtcaatgggagtttgttttggcaccaaaatcaacgggactttccaaaatgtcgtaacaactccgccccattgacgcaaatgggcggtaggcgtgtacggtgggaggtctatataagcagagctggtttagtgaaccgtcagatccgctagctagaccatggggactattattcaatttctggtggtcagctgtctgctggctggggcaggatctctggaccctgctgccctcatgcagattggggtgattcctaccaatgtcaggcagctcatgtattatacagaagcttcttctgcctttattgttgtgaagctgatgcctactatagacagtcccatctctggctgtaacattacttcaataagttcctataatgcaactgtgactaagctgctccagcccataggggaaaatctggaaactataagaaaccagctgattcctacaagaaggagaaggagatttgctgcagttgtgattgccctggctgccctggctgtggctacagcagcacaagtgacagctgcagtggccctggtcaaagcaaatgagaatgcagctgccatcctgaatctcaagaatgccatccagaagactaatgctgcagttgctgatgtggtgcaagccacacaatctctgggcacagcagtgcaagcagtgcaggatcatatcaactctgttgtgagcccagcaattacagctgccaactgtaaagcacaagatgccatcattggtagcatactcaatctgtatctgactgagctgaccacaatctttcacaaccagattaccaacccagccctgtctccaattaccatccaggccctcaggatactgctgggctctacactgcccactgtggttgaaaagagctttaatacccagatcagtgcagctgagctgctgtcttctggactcctgacagggcagattgttgggctggacctcacctacatgcagatggttatcaagattgaactgcctacactgactgttcagcctgccactcagattattgatctggcaacaatttcagcctttatcaataaccaggaagtgatggctcagctcccaacaagggttatggtgactggcagtctgatacaggcataccctgccagccagtgcaccataacacccaatacagtgtattgcaggtacaatgatgcccaggtgctgtctgatgacacaatggcctgcctgcaggggaatctgactaggtgcacttttagtccagtggtgggcagctttctgactaggtttgtgctgtttgatggcatagtctatgccaactgcaggtccatgctctgcaaatgcatgcagcctgcagcagttattctgcagccaagtagcagtccagtgacagtgatagacatgtataagtgtgtttctctgcaactggacaacctgaggttcaccatcactcagctggcaaatgttacttacaactcaactattaaactggagtcaagtcagattctgagcattgaccctctggatatctcccagaatctggctgcagtgaataagagcctcagtgatgcactccaacatctggcccagtcagacacctatctctcagccattacctctgcaactaccacctcagtcctgagcattatagctatatgtctgggatcactgggcctgattctgatcatactgctgagtgttgtggtgtggaagctgctgacaattgtggtggccaacaggaataggatggaaaattttgtgtaccacaaatagggatccgcccctctccctcccccccccctaacgttactggccgaagccgcttggaataaggccggtgtgcgtttgtctatatgttattttccaccatattgccgtcttttggcaatgtgagggcccggaaacctggccctgtcttcttgacgagcattcctaggggtctttcccctctcgccaaaggaatgcaaggtctgttgaatgtcgtgaaggaagcagttcctctggaagcttcttgaagacaaacaacgtctgtagcgaccctttgcaggcagcggaaccccccacctggcgacaggtgcctctgcggccaaaagccacgtgtataagatacacctgcaaaggcggcacaaccccagtgccacgttgtgagttggatagttgtggaaagagtcaaatggctctcctcaagcgtattcaacaaggggctgaaggatgcccagaaggtaccccattgtatgggatctgatctggggcctcggtgcacatgctttacatgtgtttagtcgaggttaaaaaaacgtctaggccccccgaaccacggggacgtggttttcctttgaaaaacacgatgataatatggccacaaccatggacaaagtgctgaatagggaggaaagtctgcaactgatggatctgttgggacttgagaggtctgcatggggtaatatcccacttatgaggaaagcatacctgaagaagtgtaaagagttccatcctgacaaaggtggagatgaagagaagatgaaaaagatgaacacactgtataagaaaatggaagatggtgtaaagtatgctcaccagccagattttggaggtttttgggatgccacagagatacctacttatggtacagatgagtgggaacagtggtggaatgcatttaatgaagagaatttgttttgctctgaggaaatgcctagttctgatgatgaggccacagctgactcccagcacagtactccacccaagaaaaagagaaaagtggaagacccaaaggatttcccctctgaactcttgtccttcttgtctcatgcagtgttctcaaataggaccctggcttgctttgctatctacactactaaggagaaggcagctctcttgtacaagaaaatcatggaaaagtattctgtcacctttatttccaggcacaactcctataatcataatattctctttttcttgacaccccataggcatagggtgagtgcaattaacaactatgctcagaagttgtgtactttctccttcctgatctgtaagggtgtgaataaggagtatctcatgtattcagccctgaccagagacccctttagtgtgattgaagaatccctgcctggtgggctcaaggagcatgatttcaacccagaagaggctgaagaaacaaaacaggtgagctggaagcttgtgactgaatatgcaatggagacaaagtgtgatgatgtcctgctcctcctgggaatgtacctggaatttcagtatagctttgaaatgtgtctgaaatgtatcaaaaaggaacagccttctcattataagtatcatgaaaagcactatgccaatgcagctatatttgcagattctaaaaaccagaaaaccatttgtcagcaagctgttgacacagttctggccaagaaaagagtagactctctccagcttaccagggagcagatgttgacaaataggttcaatgaccttctggacagaatggacataatgtttggctcaactggatctgcagatatagaggagtggatggctggagtggcctggctgcactgtctcctccctaaaatggacagtgtagtctatgacttccttaagtgtatggtctataatatccctaaaaagagatactggttgttcaagggacccattgattcagggaaaactacccttgctgctgcacttctggaactctgtggtgggaaagctctcaatgtcaacctgccacttgatagactcaactttgagctgggggtggcaattgatcagtttttggtagtgtttgaagatgtgaaaggtacaggaggagagtccagggatttgcctagtggccaaggcatcaacaatctggacaacctcagagactacctggatgggtctgtaaaggtcaaccttgaaaaaaagcatctcaacaagaggactcaaatatttccacctggaatagtcactatgaatgaatattcagtgcccaagaccctccaggctagatttgtcaagcaaattgatttcagacctaaagattatctgaaacattgtttggagaggagtgagttcctccttgagaaaaggattattcagtcaggaatagcactgcttcttatgctgatatggtatagaccagtggctgagtttgcccaaagcattcagagtagaatagttgagtggaaagaaaggcttgacaaggagttttctctttcagtatatcaaaagatgaagttcaatgtggctatgggtattggagtgcttgattggttgagaaacagtgatgatgatgatgaagattctcaggaaaatgctgataaaaatgaggatgggggagagaagaatatggaagattctggtcatgaaactggcattgatagtcagagccaggggagtttccaggctccacagagctcccaaagtgtccatgaccacaaccagccttaccatatatgcagaggttttacttgtttcaagaaacctcccactccccctccagaacctgaaacatgagcggccgcgactctagatcataatcagccataccacacctccccctgaacctgaaaaatcaatgcaattattgttgaaataaagcacccagcaatgcctgggaccatgtaaaactgtcctggttctttccaaggtatagagcatagcccacaggctgatatttctggccagggttggttggaggacagccttgtctataggaagagaatgaggtttttgcactataagggcatgcaagtcagtcccgcccctaactccacctggttgcccatcccgcccctaactccgcccagttccgcccattctccgccccatggctgactaattttttttatttatgcagaggcggaggccgcctcggcctctgagctattccagaagtagtgaggaggcttttttggaggcccttaattaaattgacatatctacctaatttgtgtataataaccctgataaatgcttcaataatattgaaaaaggaagagtcctgtataaaaagaaccagctgtggaatgtgtgtcagttagtaggcttatgcaaagtagcccgcccaagagacaggctgaggcccgcccaccatgatagaacaagatggacttcatgctggatctcctgcagcatgggtggaaagactttttggttatgattgggctcagcagaccattggatgttctgatgctgctgtgttcaggcttagtgcacagggtaggccagtgctctttgtgaagactgatctctctggagctttgaatgaactgcaggatgaggctgctaggctttcatggctggccaccacaggtgtcccttgtgctgcagtgttggatgtggttactgaggctgggagggattggctcctcctgggagaagtgccaggtcaggatctgttgagttctcacctggctccagctgaaaaagtctccataatggcagatgctatgagaaggctgcacacattggacccagctacatgcccatttgaccatcaggccaaacacaggattgagagggccagaacaagaatggaggctgggttggtggaccaggatgaccttgatgaggagcatcagggcctggctccagctgaattgtttgccaggctcaaggctagtatgcctgatggggaggatctggtggtaactcatggtgatgcctgtttgcctaacatcatggtggaaaatggaaggttctctggattcattgattgtggaagactgggtgtagctgacaggtatcaggacatagctcttgcaacaagggatattgcagaggagttgggtggagaatgggctgacaggttcctggtcttgtatggcattgctgccccagacagccaaagaattgctttctataggctgttggatgagtttttctaagctcagcacccacaaagctctcaggtcctaagagacactggcacccatatccatgcatcccttgtataaataaagcatccagcaaagctggtaccatgtaaaactgtcttggttgtttccaaggtatagagcatagctcaataggtttttgactttgtcccgcccctctaagtcctgcacacagatactccaatatgacatacagcatgcttgggaactgagtgcccccatgtgggcagagagcaccatgtgccacagtccctgagaagttcttgggaagggtgggcaattgccatgtgtgcctagagaaggttgtttgtaatactgccaagtgccatgtggtgtgatattggctccatgtgccttgtttgtaataacatttccatgtgtcttgggaagaaccatatataagcagagctggtttagtgaaccctcagataggcctagaccatggccagcagtgagaatgtcataacagagttcatgagattcaaggtgaggatggagggaactgtcaatggtcatgagtttgagattgaaggggaaggggagggcagaccctatgagggccacaacacagtcaaattgaaggtgaccaaagggggaccccttccctttgcctgggacatcctgagcccacagtttcagtatggttccaaagtttatgtaaagcaccctgctgacatccctgactacaagaaactgtccttcccagaaggattcaagtgggaaagggtcatgaactttgaggatggaggggttgcaacagtgacccaggacagttctctccaagatggctgtttcatctacaaggtaaaattcattggtgtgaactttccctctgatggcccagtgatgcaaaaaaagaccatgggctgggaagcctcaacagaaaggctgtaccctagagatggagttctcaagggtgagacccacaaagctctaaagctcaaagatgggggccactatctggtggagttcaagagcatctacatggcaaaaaagccagtgcagttgcctggctattactatgtggatgccaagcttgacataacctcacacaatgaagactacactattgtggaacagtatgagaggactgagggaagacatcatctgtttctgtgaattcgcactgcatggacttacctgcctggtggtatcagtcacaggctctgataaggattcagctgttgtataaataaagcatgcagcctagcaggaaccatgttaatctctcttggttgtttccttggaatactcctaagcacattaggtttttagatctgtagaaaagatcaaaggatcttcttgagatcctttttttctgcgcgtaatctgctgcttgcaaacaaaaaaaccaccgctaccagcggtggtttgtttgccggatcaagagctaccaactctttttccgaaggtaactggcttcagcagagcgcagataccaaatactgtccttctagtgtagccgtagttaggccaccacttcaagaactctgtagcaccgcctacatacctcgctctgctaatcctgttaccagtggctgctgccagtggcgataagtcgtgtcttaccgggttggactcaagacgatagttaccggataaggcgcagcggtcgggctgaacggggggttcgtgcacacagcccagcttggagcgaacgacctacaccgaactgagatacctacagcgtgagctatgagaaagcgccacgcttcccgaagggagaaaggcggacaggtatccggtaagcggcagggtcggaacaggagagcgcacgagggagcttccagggggaaacgcctggtatctttatagtcctgtcgggtttcgccacctctgacttgagcgtcgatttttgtgatgctcgtcaggggggcggagcctatggaaaaacgccagcaacgcggcctttttacgg

SEQ ID NO: 664 - DNA, 7904 bp, Artificial Sequence
  pC-CDase-I-T-BB3  (pC-bCDase-IT-BB3)
ttcctattaatagtaatcaattacggggtcattagttcatagcccatatatggagttccgcgttacataacttacggtaaatggcccgcctggctgaccgcccaacgacccccgcccattgacgtcaataatgacgtatgttcccatagtaacgccaatagggactttccattgacgtcaatgggtggagtatttacggtaaactgcccacttggcagtacatcaagtgtatcatatgccaagtacgccccctattgacgtcaatgacggtaaatggcccgcctggcattatgcccagtacatgaccttatgggactttcctacttggcagtacatctacgtattagtcatcgctattaccatggtgatgcggttttggcagtacatcaatgggcgtggatagcggtttgactcacggggatttccaagtctccaccccattgacgtcaatgggagtttgttttggcaccaaaatcaacgggactttccaaaatgtcgtaacaactccgccccattgacgcaaatgggcggtaggcgtgtacggtgggaggtctatataagcagagctggtttagtgaaccgtcagatccgctagcaccatgtcaaacaatgcactgcagactattatcaatgctaggctgcctggaaaagaagggctgtggcagattcacctgcaggatgggaaaatcagtgccattgatgcccagtctggagtgatgcctgtcacagaaaattccctggatgcagagcagggactggtgctgccaccttttgtggaaccccacatccatctggataccacacagacagctggccagcctaactggaatcagtctggaactctgtttgagggcattgaaagatgggctgagaggaaggctctgctgacccatgatgatgtgaagcagagggcctggcagacactgaaatggcagattgctaatggcattcagcatgtgagaacccatgtggatgtcagtgatgcaacactgactgctctgaaggcaatgctggaggtgaaacaggaagtggccccctggattgatctgcagattgctgctttccctcaggaaggcatcctgtcttatccaaatggagaggctctgctggaggaggcactgagactgggagcagatgtggttggagctattcctcactttgagtttactagagaatatggagtggagtcactgcataagacctttgccctggctcagaaatatgacagactgattgatgtgcactgtgatgaaattgatgatgagcagagcaggtttgtggaaacagtggcagccctggcccatagagagggaatgggagcaagagtgactgcctctcacactactgctatgcatagttacaatggggcatatacctcaagactgttcaggctgctgaagatgagtggaatcaactttgtggctaaccccctggtgaacattcacctgcagggcaggtttgatacttatccaaagaggagagggatcaccagagtgaaagagatgctggaatctggcatcaatgtgtgctttgggcatgatgatgtctgtggaccatggtatcccctgggcacagccaacatgctgcaggtgctgcacatgggcctgcatgtgtgtcagctgatggggtatggacagatcaatgatgggctgaacctgattacccaccattctgctaggacactgaatctgcaggactatggcattgctgcagggaacagtgcaaatctgatcattctgccagcagagaatggatttgatgcactgaggagacaggtgcctgtcaggtacagtgtgagaggagggaaagtcattgcctccacacagccagctcagaccacagtctacctggaacagcctgaagccattgattacaagaggtgaggatccgcccctctccctcccccccccctaacgttactggccgaagccgcttggaataaggccggtgtgcgtttgtctatatgttattttccaccatattgccgtcttttggcaatgtgagggcccggaaacctggccctgtcttcttgacgagcattcctaggggtctttcccctctcgccaaaggaatgcaaggtctgttgaatgtcgtgaaggaagcagttcctctggaagcttcttgaagacaaacaacgtctgtagcgaccctttgcaggcagcggaaccccccacctggcgacaggtgcctctgcggccaaaagccacgtgtataagatacacctgcaaaggcggcacaaccccagtgccacgttgtgagttggatagttgtggaaagagtcaaatggctctcctcaagcgtattcaacaaggggctgaaggatgcccagaaggtaccccattgtatgggatctgatctggggcctcggtgcacatgctttacatgtgtttagtcgaggttaaaaaaacgtctaggccccccgaaccacggggacgtggttttcctttgaaaaacacgatgataatatggccacaaccatggacaaagtgctgaatagggaggaaagtctgcaactgatggatctgttgggacttgagaggtctgcatggggtaatatcccacttatgaggaaagcatacctgaagaagtgtaaagagttccatcctgacaaaggtggagatgaagagaagatgaaaaagatgaacacactgtataagaaaatggaagatggtgtaaagtatgctcaccagccagattttggaggtttttgggatgccacagagatacctacttatggtacagatgagtgggaacagtggtggaatgcatttaatgaagagaatttgttttgctctgaggaaatgcctagttctgatgatgaggccacagctgactcccagcacagtactccacccaagaaaaagagaaaagtggaagacccaaaggatttcccctctgaactcttgtccttcttgtctcatgcagtgttctcaaataggaccctggcttgctttgctatctacactactaaggagaaggcagctctcttgtacaagaaaatcatggaaaagtattctgtcacctttatttccaggcacaactcctataatcataatattctctttttcttgacaccccataggcatagggtgagtgcaattaacaactatgctcagaagttgtgtactttctccttcctgatctgtaagggtgtgaataaggagtatctcatgtattcagccctgaccagagacccctttagtgtgattgaagaatccctgcctggtgggctcaaggagcatgatttcaacccagaagaggctgaagaaacaaaacaggtgagctggaagcttgtgactgaatatgcaatggagacaaagtgtgatgatgtcctgctcctcctgggaatgtacctggaatttcagtatagctttgaaatgtgtctgaaatgtatcaaaaaggaacagccttctcattataagtatcatgaaaagcactatgccaatgcagctatatttgcagattctaaaaaccagaaaaccatttgtcagcaagctgttgacacagttctggccaagaaaagagtagactctctccagcttaccagggagcagatgttgacaaataggttcaatgaccttctggacagaatggacataatgtttggctcaactggatctgcagatatagaggagtggatggctggagtggcctggctgcactgtctcctccctaaaatggacagtgtagtctatgacttccttaagtgtatggtctataatatccctaaaaagagatactggttgttcaagggacccattgattcagggaaaactacccttgctgctgcacttctggaactctgtggtgggaaagctctcaatgtcaacctgccacttgatagactcaactttgagctgggggtggcaattgatcagtttttggtagtgtttgaagatgtgaaaggtacaggaggagagtccagggatttgcctagtggccaaggcatcaacaatctggacaacctcagagactacctggatgggtctgtaaaggtcaaccttgaaaaaaagcatctcaacaagaggactcaaatatttccacctggaatagtcactatgaatgaatattcagtgcccaagaccctccaggctagatttgtcaagcaaattgatttcagacctaaagattatctgaaacattgtttggagaggagtgagttcctccttgagaaaaggattattcagtcaggaatagcactgcttcttatgctgatatggtatagaccagtggctgagtttgcccaaagcattcagagtagaatagttgagtggaaagaaaggcttgacaaggagttttctctttcagtatatcaaaagatgaagttcaatgtggctatgggtattggagtgcttgattggttgagaaacagtgatgatgatgatgaagattctcaggaaaatgctgataaaaatgaggatgggggagagaagaatatggaagattctggtcatgaaactggcattgatagtcagagccaggggagtttccaggctccacagagctcccaaagtgtccatgaccacaaccagccttaccatatatgcagaggttttacttgtttcaagaaacctcccactccccctccagaacctgaaacatgagcggccgcgactctagatcataatcagccataccacacctccccctgaacctgaaaaatcaatgcaattattgttgaaataaagcacccagcaatgcctgggaccatgtaaaactgtcctggttctttccaaggtatagagcatagcccacaggctgatatttctggccagggttggttggaggacagccttgtctataggaagagaatgaggtttttgcactataagggcatgcaagtcagtcccgcccctaactccacctggttgcccatcccgcccctaactccgcccagttccgcccattctccgccccatggctgactaattttttttatttatgcagaggcggaggccgcctcggcctctgagctattccagaagtagtgaggaggcttttttggaggcccttaattaaattgacatatctacctaatttgtgtataataaccctgataaatgcttcaataatattgaaaaaggaagagtcctgtataaaaagaaccagctgtggaatgtgtgtcagttagtaggcttatgcaaagtagcccgcccaagagacaggctgaggcccgcccaccatgatagaacaagatggacttcatgctggatctcctgcagcatgggtggaaagactttttggttatgattgggctcagcagaccattggatgttctgatgctgctgtgttcaggcttagtgcacagggtaggccagtgctctttgtgaagactgatctctctggagctttgaatgaactgcaggatgaggctgctaggctttcatggctggccaccacaggtgtcccttgtgctgcagtgttggatgtggttactgaggctgggagggattggctcctcctgggagaagtgccaggtcaggatctgttgagttctcacctggctccagctgaaaaagtctccataatggcagatgctatgagaaggctgcacacattggacccagctacatgcccatttgaccatcaggccaaacacaggattgagagggccagaacaagaatggaggctgggttggtggaccaggatgaccttgatgaggagcatcagggcctggctccagctgaattgtttgccaggctcaaggctagtatgcctgatggggaggatctggtggtaactcatggtgatgcctgtttgcctaacatcatggtggaaaatggaaggttctctggattcattgattgtggaagactgggtgtagctgacaggtatcaggacatagctcttgcaacaagggatattgcagaggagttgggtggagaatgggctgacaggttcctggtcttgtatggcattgctgccccagacagccaaagaattgctttctataggctgttggatgagtttttctaagctcagcacccacaaagctctcaggtcctaagagacactggcacccatatccatgcatcccttgtataaataaagcatccagcaaagctggtaccatgtaaaactgtcttggttgtttccaaggtatagagcatagctcaataggtttttgactttgtcccgcccctctaagtcctgcacacagatactccaatatgacatacagcatgcttgggaactgagtgcccccatgtgggcagagagcaccatgtgccacagtccctgagaagttcttgggaagggtgggcaattgccatgtgtgcctagagaaggttgtttgtaatactgccaagtgccatgtggtgtgatattggctccatgtgccttgtttgtaataacatttccatgtgtcttgggaagaaccatatataagcagagctggtttagtgaaccctcagataggcctagaccatggccagcagtgagaatgtcataacagagttcatgagattcaaggtgaggatggagggaactgtcaatggtcatgagtttgagattgaaggggaaggggagggcagaccctatgagggccacaacacagtcaaattgaaggtgaccaaagggggaccccttccctttgcctgggacatcctgagcccacagtttcagtatggttccaaagtttatgtaaagcaccctgctgacatccctgactacaagaaactgtccttcccagaaggattcaagtgggaaagggtcatgaactttgaggatggaggggttgcaacagtgacccaggacagttctctccaagatggctgtttcatctacaaggtaaaattcattggtgtgaactttccctctgatggcccagtgatgcaaaaaaagaccatgggctgggaagcctcaacagaaaggctgtaccctagagatggagttctcaagggtgagacccacaaagctctaaagctcaaagatgggggccactatctggtggagttcaagagcatctacatggcaaaaaagccagtgcagttgcctggctattactatgtggatgccaagcttgacataacctcacacaatgaagactacactattgtggaacagtatgagaggactgagggaagacatcatctgtttctgtgaattcgcactgcatggacttacctgcctggtggtatcagtcacaggctctgataaggattcagctgttgtataaataaagcatgcagcctagcaggaaccatgttaatctctcttggttgtttccttggaatactcctaagcacattaggtttttagatctgtagaaaagatcaaaggatcttcttgagatcctttttttctgcgcgtaatctgctgcttgcaaacaaaaaaaccaccgctaccagcggtggtttgtttgccggatcaagagctaccaactctttttccgaaggtaactggcttcagcagagcgcagataccaaatactgtccttctagtgtagccgtagttaggccaccacttcaagaactctgtagcaccgcctacatacctcgctctgctaatcctgttaccagtggctgctgccagtggcgataagtcgtgtcttaccgggttggactcaagacgatagttaccggataaggcgcagcggtcgggctgaacggggggttcgtgcacacagcccagcttggagcgaacgacctacaccgaactgagatacctacagcgtgagctatgagaaagcgccacgcttcccgaagggagaaaggcggacaggtatccggtaagcggcagggtcggaacaggagagcgcacgagggagcttccagggggaaacgcctggtatctttatagtcctgtcgggtttcgccacctctgacttgagcgtcgatttttgtgatgctcgtcaggggggcggagcctatggaaaaacgccagcaacgcggcctttttacgg

SEQ ID NO: 665 - DNA, 7777 bp, Artificial Sequence
  pC-CDase-I-T-dSV  (pC-bCDase-IT-dSV)
ttcctattaatagtaatcaattacggggtcattagttcatagcccatatatggagttccgcgttacataacttacggtaaatggcccgcctggctgaccgcccaacgacccccgcccattgacgtcaataatgacgtatgttcccatagtaacgccaatagggactttccattgacgtcaatgggtggagtatttacggtaaactgcccacttggcagtacatcaagtgtatcatatgccaagtacgccccctattgacgtcaatgacggtaaatggcccgcctggcattatgcccagtacatgaccttatgggactttcctacttggcagtacatctacgtattagtcatcgctattaccatggtgatgcggttttggcagtacatcaatgggcgtggatagcggtttgactcacggggatttccaagtctccaccccattgacgtcaatgggagtttgttttggcaccaaaatcaacgggactttccaaaatgtcgtaacaactccgccccattgacgcaaatgggcggtaggcgtgtacggtgggaggtctatataagcagagctggtttagtgaaccgtcagatccgctagcaccatgtcaaacaatgcactgcagactattatcaatgctaggctgcctggaaaagaagggctgtggcagattcacctgcaggatgggaaaatcagtgccattgatgcccagtctggagtgatgcctgtcacagaaaattccctggatgcagagcagggactggtgctgccaccttttgtggaaccccacatccatctggataccacacagacagctggccagcctaactggaatcagtctggaactctgtttgagggcattgaaagatgggctgagaggaaggctctgctgacccatgatgatgtgaagcagagggcctggcagacactgaaatggcagattgctaatggcattcagcatgtgagaacccatgtggatgtcagtgatgcaacactgactgctctgaaggcaatgctggaggtgaaacaggaagtggccccctggattgatctgcagattgctgctttccctcaggaaggcatcctgtcttatccaaatggagaggctctgctggaggaggcactgagactgggagcagatgtggttggagctattcctcactttgagtttactagagaatatggagtggagtcactgcataagacctttgccctggctcagaaatatgacagactgattgatgtgcactgtgatgaaattgatgatgagcagagcaggtttgtggaaacagtggcagccctggcccatagagagggaatgggagcaagagtgactgcctctcacactactgctatgcatagttacaatggggcatatacctcaagactgttcaggctgctgaagatgagtggaatcaactttgtggctaaccccctggtgaacattcacctgcagggcaggtttgatacttatccaaagaggagagggatcaccagagtgaaagagatgctggaatctggcatcaatgtgtgctttgggcatgatgatgtctgtggaccatggtatcccctgggcacagccaacatgctgcaggtgctgcacatgggcctgcatgtgtgtcagctgatggggtatggacagatcaatgatgggctgaacctgattacccaccattctgctaggacactgaatctgcaggactatggcattgctgcagggaacagtgcaaatctgatcattctgccagcagagaatggatttgatgcactgaggagacaggtgcctgtcaggtacagtgtgagaggagggaaagtcattgcctccacacagccagctcagaccacagtctacctggaacagcctgaagccattgattacaagaggtgaggatccgcccctctccctcccccccccctaacgttactggccgaagccgcttggaataaggccggtgtgcgtttgtctatatgttattttccaccatattgccgtcttttggcaatgtgagggcccggaaacctggccctgtcttcttgacgagcattcctaggggtctttcccctctcgccaaaggaatgcaaggtctgttgaatgtcgtgaaggaagcagttcctctggaagcttcttgaagacaaacaacgtctgtagcgaccctttgcaggcagcggaaccccccacctggcgacaggtgcctctgcggccaaaagccacgtgtataagatacacctgcaaaggcggcacaaccccagtgccacgttgtgagttggatagttgtggaaagagtcaaatggctctcctcaagcgtattcaacaaggggctgaaggatgcccagaaggtaccccattgtatgggatctgatctggggcctcggtgcacatgctttacatgtgtttagtcgaggttaaaaaaacgtctaggccccccgaaccacggggacgtggttttcctttgaaaaacacgatgataatatggccacaaccatggacaaagtgctgaatagggaggaaagtctgcaactgatggatctgttgggacttgagaggtctgcatggggtaatatcccacttatgaggaaagcatacctgaagaagtgtaaagagttccatcctgacaaaggtggagatgaagagaagatgaaaaagatgaacacactgtataagaaaatggaagatggtgtaaagtatgctcaccagccagattttggaggtttttgggatgccacagagatacctacttatggtacagatgagtgggaacagtggtggaatgcatttaatgaagagaatttgttttgctctgaggaaatgcctagttctgatgatgaggccacagctgactcccagcacagtactccacccaagaaaaagagaaaagtggaagacccaaaggatttcccctctgaactcttgtccttcttgtctcatgcagtgttctcaaataggaccctggcttgctttgctatctacactactaaggagaaggcagctctcttgtacaagaaaatcatggaaaagtattctgtcacctttatttccaggcacaactcctataatcataatattctctttttcttgacaccccataggcatagggtgagtgcaattaacaactatgctcagaagttgtgtactttctccttcctgatctgtaagggtgtgaataaggagtatctcatgtattcagccctgaccagagacccctttagtgtgattgaagaatccctgcctggtgggctcaaggagcatgatttcaacccagaagaggctgaagaaacaaaacaggtgagctggaagcttgtgactgaatatgcaatggagacaaagtgtgatgatgtcctgctcctcctgggaatgtacctggaatttcagtatagctttgaaatgtgtctgaaatgtatcaaaaaggaacagccttctcattataagtatcatgaaaagcactatgccaatgcagctatatttgcagattctaaaaaccagaaaaccatttgtcagcaagctgttgacacagttctggccaagaaaagagtagactctctccagcttaccagggagcagatgttgacaaataggttcaatgaccttctggacagaatggacataatgtttggctcaactggatctgcagatatagaggagtggatggctggagtggcctggctgcactgtctcctccctaaaatggacagtgtagtctatgacttccttaagtgtatggtctataatatccctaaaaagagatactggttgttcaagggacccattgattcagggaaaactacccttgctgctgcacttctggaactctgtggtgggaaagctctcaatgtcaacctgccacttgatagactcaactttgagctgggggtggcaattgatcagtttttggtagtgtttgaagatgtgaaaggtacaggaggagagtccagggatttgcctagtggccaaggcatcaacaatctggacaacctcagagactacctggatgggtctgtaaaggtcaaccttgaaaaaaagcatctcaacaagaggactcaaatatttccacctggaatagtcactatgaatgaatattcagtgcccaagaccctccaggctagatttgtcaagcaaattgatttcagacctaaagattatctgaaacattgtttggagaggagtgagttcctccttgagaaaaggattattcagtcaggaatagcactgcttcttatgctgatatggtatagaccagtggctgagtttgcccaaagcattcagagtagaatagttgagtggaaagaaaggcttgacaaggagttttctctttcagtatatcaaaagatgaagttcaatgtggctatgggtattggagtgcttgattggttgagaaacagtgatgatgatgatgaagattctcaggaaaatgctgataaaaatgaggatgggggagagaagaatatggaagattctggtcatgaaactggcattgatagtcagagccaggggagtttccaggctccacagagctcccaaagtgtccatgaccacaaccagccttaccatatatgcagaggttttacttgtttcaagaaacctcccactccccctccagaacctgaaacatgagcggccgcgactctagatcataatcagccataccacacctccccctgaacctgaaaaatcaatgcaattattgttgaaataaagcacccagcaatgcctgggaccatgtaaaactgtcctggttctttccaaggtatagagcatagcccacaggctgatatttctggccagggttggttggaggacagccttgtctataggaagagaatgaggtttttgcactataagggcatgcaagtcagtcccgcccctaactccacctggttaggaggggaggaggattaataaattgacatatctacctaatttgtgtataataaccctgataaatgcttcaataatattgaaaaaggaagagtcctgtataaaaagaaccagctgtggaatgtgtgtcagttagtaggcttatgcaaagtagcccgcccaagagacaggctgaggcccgcccaccatgatagaacaagatggacttcatgctggatctcctgcagcatgggtggaaagactttttggttatgattgggctcagcagaccattggatgttctgatgctgctgtgttcaggcttagtgcacagggtaggccagtgctctttgtgaagactgatctctctggagctttgaatgaactgcaggatgaggctgctaggctttcatggctggccaccacaggtgtcccttgtgctgcagtgttggatgtggttactgaggctgggagggattggctcctcctgggagaagtgccaggtcaggatctgttgagttctcacctggctccagctgaaaaagtctccataatggcagatgctatgagaaggctgcacacattggacccagctacatgcccatttgaccatcaggccaaacacaggattgagagggccagaacaagaatggaggctgggttggtggaccaggatgaccttgatgaggagcatcagggcctggctccagctgaattgtttgccaggctcaaggctagtatgcctgatggggaggatctggtggtaactcatggtgatgcctgtttgcctaacatcatggtggaaaatggaaggttctctggattcattgattgtggaagactgggtgtagctgacaggtatcaggacatagctcttgcaacaagggatattgcagaggagttgggtggagaatgggctgacaggttcctggtcttgtatggcattgctgccccagacagccaaagaattgctttctataggctgttggatgagtttttctaagctcagcacccacaaagctctcaggtcctaagagacactggcacccatatccatgcatcccttgtataaataaagcatccagcaaagctggtaccatgtaaaactgtcttggttgtttccaaggtatagagcatagctcaataggtttttgactttgtcccgcccctctaagtcctgcacacagatactccaatatgacatacagcatgcttgggaactgagtgcccccatgtgggcagagagcaccatgtgccacagtccctgagaagttcttgggaagggtgggcaattgccatgtgtgcctagagaaggttgtttgtaatactgccaagtgccatgtggtgtgatattggctccatgtgccttgtttgtaataacatttccatgtgtcttgggaagaaccatatataagcagagctggtttagtgaaccctcagataggcctagaccatggccagcagtgagaatgtcataacagagttcatgagattcaaggtgaggatggagggaactgtcaatggtcatgagtttgagattgaaggggaaggggagggcagaccctatgagggccacaacacagtcaaattgaaggtgaccaaagggggaccccttccctttgcctgggacatcctgagcccacagtttcagtatggttccaaagtttatgtaaagcaccctgctgacatccctgactacaagaaactgtccttcccagaaggattcaagtgggaaagggtcatgaactttgaggatggaggggttgcaacagtgacccaggacagttctctccaagatggctgtttcatctacaaggtaaaattcattggtgtgaactttccctctgatggcccagtgatgcaaaaaaagaccatgggctgggaagcctcaacagaaaggctgtaccctagagatggagttctcaagggtgagacccacaaagctctaaagctcaaagatgggggccactatctggtggagttcaagagcatctacatggcaaaaaagccagtgcagttgcctggctattactatgtggatgccaagcttgacataacctcacacaatgaagactacactattgtggaacagtatgagaggactgagggaagacatcatctgtttctgtgaattcgcactgcatggacttacctgcctggtggtatcagtcacaggctctgataaggattcagctgttgtataaataaagcatgcagcctagcaggaaccatgttaatctctcttggttgtttccttggaatactcctaagcacattaggtttttagatctgtagaaaagatcaaaggatcttcttgagatcctttttttctgcgcgtaatctgctgcttgcaaacaaaaaaaccaccgctaccagcggtggtttgtttgccggatcaagagctaccaactctttttccgaaggtaactggcttcagcagagcgcagataccaaatactgtccttctagtgtagccgtagttaggccaccacttcaagaactctgtagcaccgcctacatacctcgctctgctaatcctgttaccagtggctgctgccagtggcgataagtcgtgtcttaccgggttggactcaagacgatagttaccggataaggcgcagcggtcgggctgaacggggggttcgtgcacacagcccagcttggagcgaacgacctacaccgaactgagatacctacagcgtgagctatgagaaagcgccacgcttcccgaagggagaaaggcggacaggtatccggtaagcggcagggtcggaacaggagagcgcacgagggagcttccagggggaaacgcctggtatctttatagtcctgtcgggtttcgccacctctgacttgagcgtcgatttttgtgatgctcgtcaggggggcggagcctatggaaaaacgccagcaacgcggcctttttacgg

SEQ ID NO: 666 - DNA, 7680 bp, Artificial Sequence
  pCMV/EF1-zGFP-I-T-BB3
ttcctattaatggagtcaatgggaaaaacccattggagccaagtacactgactcaatagggactttccattgggttttgcccagtacataaggtcaatagggggtgagtcaacaggaaagtcccattggagccaagtacattgagtcaatagggactttccaatgggttttgcccagtacataaggtcaatgggaggtaagccaatgggtttttcccattactgacatgtatactgagtcattagggactttccaatgggttttgcccagtacataaggtcaataggggtgaatcaacaggaaagtcccattggagccaagtacactgagtcaatagggactttccattgggttttgcccagtacaaaaggtcaatagggggtgagtcaatgggtttttcccattattggcacatacataaggtcaataggggtgactagtggagaagagcatgcttgagggctgagtgcccctcagtgggcagagagcacatggcccacagtccctgagaagttggggggaggggtgggcaattgaactggtgcctagagaaggtggggcttgggtaaactgggaaagtgatgtggtgtactggctccacctttttccccagggtgggggagaaccatatataagtgcagtagtctctgtgaacattccataatcctgcgcgcgccccgccccgccattggccgtaccgccccgcgccgccgccccatctcgcccctcgccgccgggtccggcgcgttaaagccaataggaaccgccgccgttgttcccgtcacggccggggcagccaattgtggcggcgctcggcggctcgtggctctttcgcggcaaaaaggatttggcgcgtaaaagtggccgggactttgcaggcagcggcggccgggggcggagcgggatcgagccctcgccgtggcctgccgccgctagctagaccatggtgagcaagggagaggaactctttacaggtgtggtcccaattctggtggagctggatggagatgtgaatgggcacaaattttctgtcagtggagagggagagggggatgctacctatggcaaactgactctgaagttcatctgcactactggcaagctgcctgtgccatggccaactctggtgacaaccctcacctatggagtccagtgcttttccagatatcctgaccacatgaaacagcatgactttttcaaatctgcaatgcctgagggctatgtgcaagagagaactatctttttcaaggatgatgggaactataagactagggctgaggtgaaatttgaaggagacaccctggtcaataggattgagctcaaggggattgacttcaaggaggatggcaacattctgggccataagctggagtataattacaattcccacaatgtctacattatggctgacaagcagaagaatggcattaaggtcaacttcaagattagacacaacatagaggatggatctgtgcagctggctgaccattaccagcagaatacacctattggggatgggccagtgctgctccctgacaatcactatctgagcacccaatctgctttgtctaaagatcctaatgaaaagagagatcacatggtgctgctggagtttgtaactgctgcaggaattaccttgggtatggatgaactctataaggatccgcccctctccctcccccccccctaacgttactggccgaagccgcttggaataaggccggtgtgcgtttgtctatatgttattttccaccatattgccgtcttttggcaatgtgagggcccggaaacctggccctgtcttcttgacgagcattcctaggggtctttcccctctcgccaaaggaatgcaaggtctgttgaatgtcgtgaaggaagcagttcctctggaagcttcttgaagacaaacaacgtctgtagcgaccctttgcaggcagcggaaccccccacctggcgacaggtgcctctgcggccaaaagccacgtgtataagatacacctgcaaaggcggcacaaccccagtgccacgttgtgagttggatagttgtggaaagagtcaaatggctctcctcaagcgtattcaacaaggggctgaaggatgcccagaaggtaccccattgtatgggatctgatctggggcctcggtgcacatgctttacatgtgtttagtcgaggttaaaaaaacgtctaggccccccgaaccacggggacgtggttttcctttgaaaaacacgatgataatatggccacaaccatggacaaagtgctgaatagggaggaaagtctgcaactgatggatctgttgggacttgagaggtctgcatggggtaatatcccacttatgaggaaagcatacctgaagaagtgtaaagagttccatcctgacaaaggtggagatgaagagaagatgaaaaagatgaacacactgtataagaaaatggaagatggtgtaaagtatgctcaccagccagattttggaggtttttgggatgccacagagatacctacttatggtacagatgagtgggaacagtggtggaatgcatttaatgaagagaatttgttttgctctgaggaaatgcctagttctgatgatgaggccacagctgactcccagcacagtactccacccaagaaaaagagaaaagtggaagacccaaaggatttcccctctgaactcttgtccttcttgtctcatgcagtgttctcaaataggaccctggcttgctttgctatctacactactaaggagaaggcagctctcttgtacaagaaaatcatggaaaagtattctgtcacctttatttccaggcacaactcctataatcataatattctctttttcttgacaccccataggcatagggtgagtgcaattaacaactatgctcagaagttgtgtactttctccttcctgatctgtaagggtgtgaataaggagtatctcatgtattcagccctgaccagagacccctttagtgtgattgaagaatccctgcctggtgggctcaaggagcatgatttcaacccagaagaggctgaagaaacaaaacaggtgagctggaagcttgtgactgaatatgcaatggagacaaagtgtgatgatgtcctgctcctcctgggaatgtacctggaatttcagtatagctttgaaatgtgtctgaaatgtatcaaaaaggaacagccttctcattataagtatcatgaaaagcactatgccaatgcagctatatttgcagattctaaaaaccagaaaaccatttgtcagcaagctgttgacacagttctggccaagaaaagagtagactctctccagcttaccagggagcagatgttgacaaataggttcaatgaccttctggacagaatggacataatgtttggctcaactggatctgcagatatagaggagtggatggctggagtggcctggctgcactgtctcctccctaaaatggacagtgtagtctatgacttccttaagtgtatggtctataatatccctaaaaagagatactggttgttcaagggacccattgattcagggaaaactacccttgctgctgcacttctggaactctgtggtgggaaagctctcaatgtcaacctgccacttgatagactcaactttgagctgggggtggcaattgatcagtttttggtagtgtttgaagatgtgaaaggtacaggaggagagtccagggatttgcctagtggccaaggcatcaacaatctggacaacctcagagactacctggatgggtctgtaaaggtcaaccttgaaaaaaagcatctcaacaagaggactcaaatatttccacctggaatagtcactatgaatgaatattcagtgcccaagaccctccaggctagatttgtcaagcaaattgatttcagacctaaagattatctgaaacattgtttggagaggagtgagttcctccttgagaaaaggattattcagtcaggaatagcactgcttcttatgctgatatggtatagaccagtggctgagtttgcccaaagcattcagagtagaatagttgagtggaaagaaaggcttgacaaggagttttctctttcagtatatcaaaagatgaagttcaatgtggctatgggtattggagtgcttgattggttgagaaacagtgatgatgatgatgaagattctcaggaaaatgctgataaaaatgaggatgggggagagaagaatatggaagattctggtcatgaaactggcattgatagtcagagccaggggagtttccaggctccacagagctcccaaagtgtccatgaccacaaccagccttaccatatatgcagaggttttacttgtttcaagaaacctcccactccccctccagaacctgaaacatgagcggccgcgactctagatcataatcagccataccacacctccccctgaacctgaaaaatcaatgcaattattgttgaaataaagcacccagcaatgcctgggaccatgtaaaactgtcctggttctttccaaggtatagagcatagcccacaggctgatatttctggccagggttggttggaggacagccttgtctataggaagagaatgaggtttttgcactataagggcatgcaagtcagtcccgcccctaactccacctggttgcccatcccgcccctaactccgcccagttccgcccattctccgccccatggctgactaattttttttatttatgcagaggcggaggccgcctcggcctctgagctattccagaagtagtgaggaggcttttttggaggcccttaattaaattgacatatctacctaatttgtgtataataaccctgataaatgcttcaataatattgaaaaaggaagagtcctgtataaaaagaaccagctgtggaatgtgtgtcagttagtaggcttatgcaaagtagcccgcccaagagacaggctgaggcccgcccaccatgatagaacaagatggacttcatgctggatctcctgcagcatgggtggaaagactttttggttatgattgggctcagcagaccattggatgttctgatgctgctgtgttcaggcttagtgcacagggtaggccagtgctctttgtgaagactgatctctctggagctttgaatgaactgcaggatgaggctgctaggctttcatggctggccaccacaggtgtcccttgtgctgcagtgttggatgtggttactgaggctgggagggattggctcctcctgggagaagtgccaggtcaggatctgttgagttctcacctggctccagctgaaaaagtctccataatggcagatgctatgagaaggctgcacacattggacccagctacatgcccatttgaccatcaggccaaacacaggattgagagggccagaacaagaatggaggctgggttggtggaccaggatgaccttgatgaggagcatcagggcctggctccagctgaattgtttgccaggctcaaggctagtatgcctgatggggaggatctggtggtaactcatggtgatgcctgtttgcctaacatcatggtggaaaatggaaggttctctggattcattgattgtggaagactgggtgtagctgacaggtatcaggacatagctcttgcaacaagggatattgcagaggagttgggtggagaatgggctgacaggttcctggtcttgtatggcattgctgccccagacagccaaagaattgctttctataggctgttggatgagtttttctaagctcagcacccacaaagctctcaggtcctaagagacactggcacccatatccatgcatcccttgtataaataaagcatccagcaaagctggtaccatgtaaaactgtcttggttgtttccaaggtatagagcatagctcaataggtttttgactttgtcccgcccctctaagtcctgcacacagatactccaatatgacatacagcatgcttgggaactgagtgcccccatgtgggcagagagcaccatgtgccacagtccctgagaagttcttgggaagggtgggcaattgccatgtgtgcctagagaaggttgtttgtaatactgccaagtgccatgtggtgtgatattggctccatgtgccttgtttgtaataacatttccatgtgtcttgggaagaaccatatataagcagagctggtttagtgaaccctcagataggcctagaccatggccagcagtgagaatgtcataacagagttcatgagattcaaggtgaggatggagggaactgtcaatggtcatgagtttgagattgaaggggaaggggagggcagaccctatgagggccacaacacagtcaaattgaaggtgaccaaagggggaccccttccctttgcctgggacatcctgagcccacagtttcagtatggttccaaagtttatgtaaagcaccctgctgacatccctgactacaagaaactgtccttcccagaaggattcaagtgggaaagggtcatgaactttgaggatggaggggttgcaacagtgacccaggacagttctctccaagatggctgtttcatctacaaggtaaaattcattggtgtgaactttccctctgatggcccagtgatgcaaaaaaagaccatgggctgggaagcctcaacagaaaggctgtaccctagagatggagttctcaagggtgagacccacaaagctctaaagctcaaagatgggggccactatctggtggagttcaagagcatctacatggcaaaaaagccagtgcagttgcctggctattactatgtggatgccaagcttgacataacctcacacaatgaagactacactattgtggaacagtatgagaggactgagggaagacatcatctgtttctgtgaattcgcactgcatggacttacctgcctggtggtatcagtcacaggctctgataaggattcagctgttgtataaataaagcatgcagcctagcaggaaccatgttaatctctcttggttgtttccttggaatactcctaagcacattaggtttttagatctgtagaaaagatcaaaggatcttcttgagatcctttttttctgcgcgtaatctgctgcttgcaaacaaaaaaaccaccgctaccagcggtggtttgtttgccggatcaagagctaccaactctttttccgaaggtaactggcttcagcagagcgcagataccaaatactgtccttctagtgtagccgtagttaggccaccacttcaagaactctgtagcaccgcctacatacctcgctctgctaatcctgttaccagtggctgctgccagtggcgataagtcgtgtcttaccgggttggactcaagacgatagttaccggataaggcgcagcggtcgggctgaacggggggttcgtgcacacagcccagcttggagcgaacgacctacaccgaactgagatacctacagcgtgagctatgagaaagcgccacgcttcccgaagggagaaaggcggacaggtatccggtaagcggcagggtcggaacaggagagcgcacgagggagcttccagggggaaacgcctggtatctttatagtcctgtcgggtttcgccacctctgacttgagcgtcgatttttgtgatgctcgtcaggggggcggagcctatggaaaaacgccagcaacgcggcctttttacgg

SEQ ID NO: 667 - DNA, 7742 bp, Artificial Sequence
  pCMV/E2F(WT)-zGFP-I-T-BB3
ttcctattaatagtaatcaattacggggtcattagttcatagcccatatatggagttccgcgttacataacttacggtaaatggcccgcctggctgaccgcccaacgacccccgcccattgacgtcaataatgacgtatgttcccatagtaacgccaatagggactttccattgacgtcaatgggtggagtatttacggtaaactgcccacttggcagtacatcaagtgtatcatttgccaagtacgccccctattgacgtcaatgacggtaaatggcccgcctggcattatgcccagtacatgaccttatgggactttcctacttggcagtacatctacgtattagtcatcgctattaccatggtgatgcggttttggcagtacatcaatgggcgtggatagcggtttgactcacggggatttccaagtctccaccccattgacgtcaatgggagtttgttttggcaccaaaatcaacgggactttccaaaatgtcgtaacaactccgccccattgacgcaaatgggcggtaggcgtgtacggtgggaggcatatggacaaagcctgcgcgcgccccgccccgccattggccgtaccgccccgcgccgccgccccatctcgcccctcgccgccgggtccggcgcgttaaagccaataggaaccgccgccgttgttccctcacggccgccgccgggtccggcgcgttaaagccaataggaaccgccgccgttgttcccgtcacggccggggcagccaattgtggcggcgctcggcggctcgtggctctttcgcggcaaaaaggatttggcgcgtaaaagtggccgggactttgcaggcagcggcggccgggggcggagcgggatcgagccctcgatgatatcagatcatccgatcccggtggactgaaaatgagacatattatctgccacggaggtgttattaccgaagaaatggccgccagtcttttgcaaccagctgatcgaagagggctagctagaccatggtgagcaagggagaggaactctttacaggtgtggtcccaattctggtggagctggatggagatgtgaatgggcacaaattttctgtcagtggagagggagagggggatgctacctatggcaaactgactctgaagttcatctgcactactggcaagctgcctgtgccatggccaactctggtgacaaccctcacctatggagtccagtgcttttccagatatcctgaccacatgaaacagcatgactttttcaaatctgcaatgcctgagggctatgtgcaagagagaactatctttttcaaggatgatgggaactataagactagggctgaggtgaaatttgaaggagacaccctggtcaataggattgagctcaaggggattgacttcaaggaggatggcaacattctgggccataagctggagtataattacaattcccacaatgtctacattatggctgacaagcagaagaatggcattaaggtcaacttcaagattagacacaacatagaggatggatctgtgcagctggctgaccattaccagcagaatacacctattggggatgggccagtgctgctccctgacaatcactatctgagcacccaatctgctttgtctaaagatcctaatgaaaagagagatcacatggtgctgctggagtttgtaactgctgcaggaattaccttgggtatggatgaactctataagtaaggatccgcccctctccctcccccccccctaacgttactggccgaagccgcttggaataaggccggtgtgcgtttgtctatatgttattttccaccatattgccgtcttttggcaatgtgagggcccggaaacctggccctgtcttcttgacgagcattcctaggggtctttcccctctcgccaaaggaatgcaaggtctgttgaatgtcgtgaaggaagcagttcctctggaagcttcttgaagacaaacaacgtctgtagcgaccctttgcaggcagcggaaccccccacctggcgacaggtgcctctgcggccaaaagccacgtgtataagatacacctgcaaaggcggcacaaccccagtgccacgttgtgagttggatagttgtggaaagagtcaaatggctctcctcaagcgtattcaacaaggggctgaaggatgcccagaaggtaccccattgtatgggatctgatctggggcctcggtgcacatgctttacatgtgtttagtcgaggttaaaaaaacgtctaggccccccgaaccacggggacgtggttttcctttgaaaaacacgatgataatatggccacaaccatggacaaagtgctgaatagggaggaaagtctgcaactgatggatctgttgggacttgagaggtctgcatggggtaatatcccacttatgaggaaagcatacctgaagaagtgtaaagagttccatcctgacaaaggtggagatgaagagaagatgaaaaagatgaacacactgtataagaaaatggaagatggtgtaaagtatgctcaccagccagattttggaggtttttgggatgccacagagatacctacttatggtacagatgagtgggaacagtggtggaatgcatttaatgaagagaatttgttttgctctgaggaaatgcctagttctgatgatgaggccacagctgactcccagcacagtactccacccaagaaaaagagaaaagtggaagacccaaaggatttcccctctgaactcttgtccttcttgtctcatgcagtgttctcaaataggaccctggcttgctttgctatctacactactaaggagaaggcagctctcttgtacaagaaaatcatggaaaagtattctgtcacctttatttccaggcacaactcctataatcataatattctctttttcttgacaccccataggcatagggtgagtgcaattaacaactatgctcagaagttgtgtactttctccttcctgatctgtaagggtgtgaataaggagtatctcatgtattcagccctgaccagagacccctttagtgtgattgaagaatccctgcctggtgggctcaaggagcatgatttcaacccagaagaggctgaagaaacaaaacaggtgagctggaagcttgtgactgaatatgcaatggagacaaagtgtgatgatgtcctgctcctcctgggaatgtacctggaatttcagtatagctttgaaatgtgtctgaaatgtatcaaaaaggaacagccttctcattataagtatcatgaaaagcactatgccaatgcagctatatttgcagattctaaaaaccagaaaaccatttgtcagcaagctgttgacacagttctggccaagaaaagagtagactctctccagcttaccagggagcagatgttgacaaataggttcaatgaccttctggacagaatggacataatgtttggctcaactggatctgcagatatagaggagtggatggctggagtggcctggctgcactgtctcctccctaaaatggacagtgtagtctatgacttccttaagtgtatggtctataatatccctaaaaagagatactggttgttcaagggacccattgattcagggaaaactacccttgctgctgcacttctggaactctgtggtgggaaagctctcaatgtcaacctgccacttgatagactcaactttgagctgggggtggcaattgatcagtttttggtagtgtttgaagatgtgaaaggtacaggaggagagtccagggatttgcctagtggccaaggcatcaacaatctggacaacctcagagactacctggatgggtctgtaaaggtcaaccttgaaaaaaagcatctcaacaagaggactcaaatatttccacctggaatagtcactatgaatgaatattcagtgcccaagaccctccaggctagatttgtcaagcaaattgatttcagacctaaagattatctgaaacattgtttggagaggagtgagttcctccttgagaaaaggattattcagtcaggaatagcactgcttcttatgctgatatggtatagaccagtggctgagtttgcccaaagcattcagagtagaatagttgagtggaaagaaaggcttgacaaggagttttctctttcagtatatcaaaagatgaagttcaatgtggctatgggtattggagtgcttgattggttgagaaacagtgatgatgatgatgaagattctcaggaaaatgctgataaaaatgaggatgggggagagaagaatatggaagattctggtcatgaaactggcattgatagtcagagccaggggagtttccaggctccacagagctcccaaagtgtccatgaccacaaccagccttaccatatatgcagaggttttacttgtttcaagaaacctcccactccccctccagaacctgaaacatgagcggccgcgactctagatcataatcagccataccacacctccccctgaacctgaaaaatcaatgcaattattgttgaaataaagcacccagcaatgcctgggaccatgtaaaactgtcctggttctttccaaggtatagagcatagcccacaggctgatatttctggccagggttggttggaggacagccttgtctataggaagagaatgaggtttttgcactataagggcatgcaagtcagtcccgcccctaactccacctggttgcccatcccgcccctaactccgcccagttccgcccattctccgccccatggctgactaattttttttatttatgcagaggcggaggccgcctcggcctctgagctattccagaagtagtgaggaggcttttttggaggcccttaattaaattgacatatctacctaatttgtgtataataaccctgataaatgcttcaataatattgaaaaaggaagagtcctgtataaaaagaaccagctgtggaatgtgtgtcagttagtaggcttatgcaaagtagcccgcccaagagacaggctgaggcccgcccaccatgatagaacaagatggacttcatgctggatctcctgcagcatgggtggaaagactttttggttatgattgggctcagcagaccattggatgttctgatgctgctgtgttcaggcttagtgcacagggtaggccagtgctctttgtgaagactgatctctctggagctttgaatgaactgcaggatgaggctgctaggctttcatggctggccaccacaggtgtcccttgtgctgcagtgttggatgtggttactgaggctgggagggattggctcctcctgggagaagtgccaggtcaggatctgttgagttctcacctggctccagctgaaaaagtctccataatggcagatgctatgagaaggctgcacacattggacccagctacatgcccatttgaccatcaggccaaacacaggattgagagggccagaacaagaatggaggctgggttggtggaccaggatgaccttgatgaggagcatcagggcctggctccagctgaattgtttgccaggctcaaggctagtatgcctgatggggaggatctggtggtaactcatggtgatgcctgtttgcctaacatcatggtggaaaatggaaggttctctggattcattgattgtggaagactgggtgtagctgacaggtatcaggacatagctcttgcaacaagggatattgcagaggagttgggtggagaatgggctgacaggttcctggtcttgtatggcattgctgccccagacagccaaagaattgctttctataggctgttggatgagtttttctaagctcagcacccacaaagctctcaggtcctaagagacactggcacccatatccatgcatcccttgtataaataaagcatccagcaaagctggtaccatgtaaaactgtcttggttgtttccaaggtatagagcatagctcaataggtttttgactttgtcccgcccctctaagtcctgcacacagatactccaatatgacatacagcatgcttgggaactgagtgcccccatgtgggcagagagcaccatgtgccacagtccctgagaagttcttgggaagggtgggcaattgccatgtgtgcctagagaaggttgtttgtaatactgccaagtgccatgtggtgtgatattggctccatgtgccttgtttgtaataacatttccatgtgtcttgggaagaaccatatataagcagagctggtttagtgaaccctcagataggcctagaccatggccagcagtgagaatgtcataacagagttcatgagattcaaggtgaggatggagggaactgtcaatggtcatgagtttgagattgaaggggaaggggagggcagaccctatgagggccacaacacagtcaaattgaaggtgaccaaagggggaccccttccctttgcctgggacatcctgagcccacagtttcagtatggttccaaagtttatgtaaagcaccctgctgacatccctgactacaagaaactgtccttcccagaaggattcaagtgggaaagggtcatgaactttgaggatggaggggttgcaacagtgacccaggacagttctctccaagatggctgtttcatctacaaggtaaaattcattggtgtgaactttccctctgatggcccagtgatgcaaaaaaagaccatgggctgggaagcctcaacagaaaggctgtaccctagagatggagttctcaagggtgagacccacaaagctctaaagctcaaagatgggggccactatctggtggagttcaagagcatctacatggcaaaaaagccagtgcagttgcctggctattactatgtggatgccaagcttgacataacctcacacaatgaagactacactattgtggaacagtatgagaggactgagggaagacatcatctgtttctgtgaattcgcactgcatggacttacctgcctggtggtatcagtcacaggctctgataaggattcagctgttgtataaataaagcatgcagcctagcaggaaccatgttaatctctcttggttgtttccttggaatactcctaagcacattaggtttttagatctgtagaaaagatcaaaggatcttcttgagatcctttttttctgcgcgtaatctgctgcttgcaaacaaaaaaaccaccgctaccagcggtggtttgtttgccggatcaagagctaccaactctttttccgaaggtaactggcttcagcagagcgcagataccaaatactgtccttctagtgtagccgtagttaggccaccacttcaagaactctgtagcaccgcctacatacctcgctctgctaatcctgttaccagtggctgctgccagtggcgataagtcgtgtcttaccgggttggactcaagacgatagttaccggataaggcgcagcggtcgggctgaacggggggttcgtgcacacagcccagcttggagcgaacgacctacaccgaactgagatacctacagcgtgagctatgagaaagcgccacgcttcccgaagggagaaaggcggacaggtatccggtaagcggcagggtcggaacaggagagcgcacgagggagcttccagggggaaacgcctggtatctttatagtcctgtcgggtttcgccacctctgacttgagcgtcgatttttgtgatgctcgtcaggggggcggagcctatggaaaaacgccagcaacgcggcctttttacgg

SEQ ID NO: 668 - DNA, 7742 bp, Artificial Sequence; identical to SEQ ID NO: 667
  pCMV/E2F(ss)-zGFP-I-T-BB3
  CDS (1002)...(1718): zGFP

SEQ ID NO: 669 - DNA, 7742 bp, Artificial Sequence
  pCMV/E2F-zGFP-I-T(L103P)-BB3
ttcctattaatagtaatcaattacggggtcattagttcatagcccatatatggagttccgcgttacataacttacggtaaatggcccgcctggctgaccgcccaacgacccccgcccattgacgtcaataatgacgtatgttcccatagtaacgccaatagggactttccattgacgtcaatgggtggagtatttacggtaaactgcccacttggcagtacatcaagtgtatcatttgccaagtacgccccctattgacgtcaatgacggtaaatggcccgcctggcattatgcccagtacatgaccttatgggactttcctacttggcagtacatctacgtattagtcatcgctattaccatggtgatgcggttttggcagtacatcaatgggcgtggatagcggtttgactcacggggatttccaagtctccaccccattgacgtcaatgggagtttgttttggcaccaaaatcaacgggactttccaaaatgtcgtaacaactccgccccattgacgcaaatgggcggtaggcgtgtacggtgggaggcatatggacaaagcctgcgcgcgccccgccccgccattggccgtaccgccccgcgccgccgccccatctcgcccctcgccgccgggtccggcgcgttaaagccaataggaaccgccgccgttgttccctcacggccgccgccgggtccggcgcgttaaagccaataggaaccgccgccgttgttcccgtcacggccggggcagccaattgtggcggcgctcggcggctcgtggctctttcgcggcaaaaaggatttggcgcgtaaaagtggccgggactttgcaggcagcggcggccgggggcggagcgggatcgagccctcgatgatatcagatcatccgatcccggtggactgaaaatgagacatattatctgccacggaggtgttattaccgaagaaatggccgccagtcttttgcaaccagctgatcgaagagggctagctagaccatggtgagcaagggagaggaactctttacaggtgtggtcccaattctggtggagctggatggagatgtgaatgggcacaaattttctgtcagtggagagggagagggggatgctacctatggcaaactgactctgaagttcatctgcactactggcaagctgcctgtgccatggccaactctggtgacaaccctcacctatggagtccagtgcttttccagatatcctgaccacatgaaacagcatgactttttcaaatctgcaatgcctgagggctatgtgcaagagagaactatctttttcaaggatgatgggaactataagactagggctgaggtgaaatttgaaggagacaccctggtcaataggattgagctcaaggggattgacttcaaggaggatggcaacattctgggccataagctggagtataattacaattcccacaatgtctacattatggctgacaagcagaagaatggcattaaggtcaacttcaagattagacacaacatagaggatggatctgtgcagctggctgaccattaccagcagaatacacctattggggatgggccagtgctgctccctgacaatcactatctgagcacccaatctgctttgtctaaagatcctaatgaaaagagagatcacatggtgctgctggagtttgtaactgctgcaggaattaccttgggtatggatgaactctataagtaaggatccgcccctctccctcccccccccctaacgttactggccgaagccgcttggaataaggccggtgtgcgtttgtctatatgttattttccaccatattgccgtcttttggcaatgtgagggcccggaaacctggccctgtcttcttgacgagcattcctaggggtctttcccctctcgccaaaggaatgcaaggtctgttgaatgtcgtgaaggaagcagttcctctggaagcttcttgaagacaaacaacgtctgtagcgaccctttgcaggcagcggaaccccccacctggcgacaggtgcctctgcggccaaaagccacgtgtataagatacacctgcaaaggcggcacaaccccagtgccacgttgtgagttggatagttgtggaaagagtcaaatggctctcctcaagcgtattcaacaaggggctgaaggatgcccagaaggtaccccattgtatgggatctgatctggggcctcggtgcacatgctttacatgtgtttagtcgaggttaaaaaaacgtctaggccccccgaaccacggggacgtggttttcctttgaaaaacacgatgataatatggccacaaccatggacaaagtgctgaatagggaggaaagtctgcaactgatggatctgttgggacttgagaggtctgcatggggtaatatcccacttatgaggaaagcatacctgaagaagtgtaaagagttccatcctgacaaaggtggagatgaagagaagatgaaaaagatgaacacactgtataagaaaatggaagatggtgtaaagtatgctcaccagccagattttggaggtttttgggatgccacagagatacctacttatggtacagatgagtgggaacagtggtggaatgcatttaatgaagagaatccgttttgctctgaggaaatgcctagttctgatgatgaggccacagctgactcccagcacagtactccacccaagaaaaagagaaaagtggaagacccaaaggatttcccctctgaactcttgtccttcttgtctcatgcagtgttctcaaataggaccctggcttgctttgctatctacactactaaggagaaggcagctctcttgtacaagaaaatcatggaaaagtattctgtcacctttatttccaggcacaactcctataatcataatattctctttttcttgacaccccataggcatagggtgagtgcaattaacaactatgctcagaagttgtgtactttctccttcctgatctgtaagggtgtgaataaggagtatctcatgtattcagccctgaccagagacccctttagtgtgattgaagaatccctgcctggtgggctcaaggagcatgatttcaacccagaagaggctgaagaaacaaaacaggtgagctggaagcttgtgactgaatatgcaatggagacaaagtgtgatgatgtcctgctcctcctgggaatgtacctggaatttcagtatagctttgaaatgtgtctgaaatgtatcaaaaaggaacagccttctcattataagtatcatgaaaagcactatgccaatgcagctatatttgcagattctaaaaaccagaaaaccatttgtcagcaagctgttgacacagttctggccaagaaaagagtagactctctccagcttaccagggagcagatgttgacaaataggttcaatgaccttctggacagaatggacataatgtttggctcaactggatctgcagatatagaggagtggatggctggagtggcctggctgcactgtctcctccctaaaatggacagtgtagtctatgacttccttaagtgtatggtctataatatccctaaaaagagatactggttgttcaagggacccattgattcagggaaaactacccttgctgctgcacttctggaactctgtggtgggaaagctctcaatgtcaacctgccacttgatagactcaactttgagctgggggtggcaattgatcagtttttggtagtgtttgaagatgtgaaaggtacaggaggagagtccagggatttgcctagtggccaaggcatcaacaatctggacaacctcagagactacctggatgggtctgtaaaggtcaaccttgaaaaaaagcatctcaacaagaggactcaaatatttccacctggaatagtcactatgaatgaatattcagtgcccaagaccctccaggctagatttgtcaagcaaattgatttcagacctaaagattatctgaaacattgtttggagaggagtgagttcctccttgagaaaaggattattcagtcaggaatagcactgcttcttatgctgatatggtatagaccagtggctgagtttgcccaaagcattcagagtagaatagttgagtggaaagaaaggcttgacaaggagttttctctttcagtatatcaaaagatgaagttcaatgtggctatgggtattggagtgcttgattggttgagaaacagtgatgatgatgatgaagattctcaggaaaatgctgataaaaatgaggatgggggagagaagaatatggaagattctggtcatgaaactggcattgatagtcagagccaggggagtttccaggctccacagagctcccaaagtgtccatgaccacaaccagccttaccatatatgcagaggttttacttgtttcaagaaacctcccactccccctccagaacctgaaacatgagcggccgcgactctagatcataatcagccataccacacctccccctgaacctgaaaaatcaatgcaattattgttgaaataaagcacccagcaatgcctgggaccatgtaaaactgtcctggttctttccaaggtatagagcatagcccacaggctgatatttctggccagggttggttggaggacagccttgtctataggaagagaatgaggtttttgcactataagggcatgcaagtcagtcccgcccctaactccacctggttgcccatcccgcccctaactccgcccagttccgcccattctccgccccatggctgactaattttttttatttatgcagaggcggaggccgcctcggcctctgagctattccagaagtagtgaggaggcttttttggaggcccttaattaaattgacatatctacctaatttgtgtataataaccctgataaatgcttcaataatattgaaaaaggaagagtcctgtataaaaagaaccagctgtggaatgtgtgtcagttagtaggcttatgcaaagtagcccgcccaagagacaggctgaggcccgcccaccatgatagaacaagatggacttcatgctggatctcctgcagcatgggtggaaagactttttggttatgattgggctcagcagaccattggatgttctgatgctgctgtgttcaggcttagtgcacagggtaggccagtgctctttgtgaagactgatctctctggagctttgaatgaactgcaggatgaggctgctaggctttcatggctggccaccacaggtgtcccttgtgctgcagtgttggatgtggttactgaggctgggagggattggctcctcctgggagaagtgccaggtcaggatctgttgagttctcacctggctccagctgaaaaagtctccataatggcagatgctatgagaaggctgcacacattggacccagctacatgcccatttgaccatcaggccaaacacaggattgagagggccagaacaagaatggaggctgggttggtggaccaggatgaccttgatgaggagcatcagggcctggctccagctgaattgtttgccaggctcaaggctagtatgcctgatggggaggatctggtggtaactcatggtgatgcctgtttgcctaacatcatggtggaaaatggaaggttctctggattcattgattgtggaagactgggtgtagctgacaggtatcaggacatagctcttgcaacaagggatattgcagaggagttgggtggagaatgggctgacaggttcctggtcttgtatggcattgctgccccagacagccaaagaattgctttctataggctgttggatgagtttttctaagctcagcacccacaaagctctcaggtcctaagagacactggcacccatatccatgcatcccttgtataaataaagcatccagcaaagctggtaccatgtaaaactgtcttggttgtttccaaggtatagagcatagctcaataggtttttgactttgtcccgcccctctaagtcctgcacacagatactccaatatgacatacagcatgcttgggaactgagtgcccccatgtgggcagagagcaccatgtgccacagtccctgagaagttcttgggaagggtgggcaattgccatgtgtgcctagagaaggttgtttgtaatactgccaagtgccatgtggtgtgatattggctccatgtgccttgtttgtaataacatttccatgtgtcttgggaagaaccatatataagcagagctggtttagtgaaccctcagataggcctagaccatggccagcagtgagaatgtcataacagagttcatgagattcaaggtgaggatggagggaactgtcaatggtcatgagtttgagattgaaggggaaggggagggcagaccctatgagggccacaacacagtcaaattgaaggtgaccaaagggggaccccttccctttgcctgggacatcctgagcccacagtttcagtatggttccaaagtttatgtaaagcaccctgctgacatccctgactacaagaaactgtccttcccagaaggattcaagtgggaaagggtcatgaactttgaggatggaggggttgcaacagtgacccaggacagttctctccaagatggctgtttcatctacaaggtaaaattcattggtgtgaactttccctctgatggcccagtgatgcaaaaaaagaccatgggctgggaagcctcaacagaaaggctgtaccctagagatggagttctcaagggtgagacccacaaagctctaaagctcaaagatgggggccactatctggtggagttcaagagcatctacatggcaaaaaagccagtgcagttgcctggctattactatgtggatgccaagcttgacataacctcacacaatgaagactacactattgtggaacagtatgagaggactgagggaagacatcatctgtttctgtgaattcgcactgcatggacttacctgcctggtggtatcagtcacaggctctgataaggattcagctgttgtataaataaagcatgcagcctagcaggaaccatgttaatctctcttggttgtttccttggaatactcctaagcacattaggtttttagatctgtagaaaagatcaaaggatcttcttgagatcctttttttctgcgcgtaatctgctgcttgcaaacaaaaaaaccaccgctaccagcggtggtttgtttgccggatcaagagctaccaactctttttccgaaggtaactggcttcagcagagcgcagataccaaatactgtccttctagtgtagccgtagttaggccaccacttcaagaactctgtagcaccgcctacatacctcgctctgctaatcctgttaccagtggctgctgccagtggcgataagtcgtgtcttaccgggttggactcaagacgatagttaccggataaggcgcagcggtcgggctgaacggggggttcgtgcacacagcccagcttggagcgaacgacctacaccgaactgagatacctacagcgtgagctatgagaaagcgccacgcttcccgaagggagaaaggcggacaggtatccggtaagcggcagggtcggaacaggagagcgcacgagggagcttccagggggaaacgcctggtatctttatagtcctgtcgggtttcgccacctctgacttgagcgtcgatttttgtgatgctcgtcaggggggcggagcctatggaaaaacgccagcaacgcggcctttttacgg

SEQ ID NO: 670 - DNA, 7742 bp, Artificial Sequence
  pCMV/E2F-zGFP-I-T(C105A)-BB3
ttcctattaatagtaatcaattacggggtcattagttcatagcccatatatggagttccgcgttacataacttacggtaaatggcccgcctggctgaccgcccaacgacccccgcccattgacgtcaataatgacgtatgttcccatagtaacgccaatagggactttccattgacgtcaatgggtggagtatttacggtaaactgcccacttggcagtacatcaagtgtatcatttgccaagtacgccccctattgacgtcaatgacggtaaatggcccgcctggcattatgcccagtacatgaccttatgggactttcctacttggcagtacatctacgtattagtcatcgctattaccatggtgatgcggttttggcagtacatcaatgggcgtggatagcggtttgactcacggggatttccaagtctccaccccattgacgtcaatgggagtttgttttggcaccaaaatcaacgggactttccaaaatgtcgtaacaactccgccccattgacgcaaatgggcggtaggcgtgtacggtgggaggcatatggacaaagcctgcgcgcgccccgccccgccattggccgtaccgccccgcgccgccgccccatctcgcccctcgccgccgggtccggcgcgttaaagccaataggaaccgccgccgttgttccctcacggccgccgccgggtccggcgcgttaaagccaataggaaccgccgccgttgttcccgtcacggccggggcagccaattgtggcggcgctcggcggctcgtggctctttcgcggcaaaaaggatttggcgcgtaaaagtggccgggactttgcaggcagcggcggccgggggcggagcgggatcgagccctcgatgatatcagatcatccgatcccggtggactgaaaatgagacatattatctgccacggaggtgttattaccgaagaaatggccgccagtcttttgcaaccagctgatcgaagagggctagctagaccatggtgagcaagggagaggaactctttacaggtgtggtcccaattctggtggagctggatggagatgtgaatgggcacaaattttctgtcagtggagagggagagggggatgctacctatggcaaactgactctgaagttcatctgcactactggcaagctgcctgtgccatggccaactctggtgacaaccctcacctatggagtccagtgcttttccagatatcctgaccacatgaaacagcatgactttttcaaatctgcaatgcctgagggctatgtgcaagagagaactatctttttcaaggatgatgggaactataagactagggctgaggtgaaatttgaaggagacaccctggtcaataggattgagctcaaggggattgacttcaaggaggatggcaacattctgggccataagctggagtataattacaattcccacaatgtctacattatggctgacaagcagaagaatggcattaaggtcaacttcaagattagacacaacatagaggatggatctgtgcagctggctgaccattaccagcagaatacacctattggggatgggccagtgctgctccctgacaatcactatctgagcacccaatctgctttgtctaaagatcctaatgaaaagagagatcacatggtgctgctggagtttgtaactgctgcaggaattaccttgggtatggatgaactctataagtaaggatccgcccctctccctcccccccccctaacgttactggccgaagccgcttggaataaggccggtgtgcgtttgtctatatgttattttccaccatattgccgtcttttggcaatgtgagggcccggaaacctggccctgtcttcttgacgagcattcctaggggtctttcccctctcgccaaaggaatgcaaggtctgttgaatgtcgtgaaggaagcagttcctctggaagcttcttgaagacaaacaacgtctgtagcgaccctttgcaggcagcggaaccccccacctggcgacaggtgcctctgcggccaaaagccacgtgtataagatacacctgcaaaggcggcacaaccccagtgccacgttgtgagttggatagttgtggaaagagtcaaatggctctcctcaagcgtattcaacaaggggctgaaggatgcccagaaggtaccccattgtatgggatctgatctggggcctcggtgcacatgctttacatgtgtttagtcgaggttaaaaaaacgtctaggccccccgaaccacggggacgtggttttcctttgaaaaacacgatgataatatggccacaaccatggacaaagtgctgaatagggaggaaagtctgcaactgatggatctgttgggacttgagaggtctgcatggggtaatatcccacttatgaggaaagcatacctgaagaagtgtaaagagttccatcctgacaaaggtggagatgaagagaagatgaaaaagatgaacacactgtataagaaaatggaagatggtgtaaagtatgctcaccagccagattttggaggtttttgggatgccacagagatacctacttatggtacagatgagtgggaacagtggtggaatgcatttaatgaagagaatttgtttgcctctgaggaaatgcctagttctgatgatgaggccacagctgactcccagcacagtactccacccaagaaaaagagaaaagtggaagacccaaaggatttcccctctgaactcttgtccttcttgtctcatgcagtgttctcaaataggaccctggcttgctttgctatctacactactaaggagaaggcagctctcttgtacaagaaaatcatggaaaagtattctgtcacctttatttccaggcacaactcctataatcataatattctctttttcttgacaccccataggcatagggtgagtgcaattaacaactatgctcagaagttgtgtactttctccttcctgatctgtaagggtgtgaataaggagtatctcatgtattcagccctgaccagagacccctttagtgtgattgaagaatccctgcctggtgggctcaaggagcatgatttcaacccagaagaggctgaagaaacaaaacaggtgagctggaagcttgtgactgaatatgcaatggagacaaagtgtgatgatgtcctgctcctcctgggaatgtacctggaatttcagtatagctttgaaatgtgtctgaaatgtatcaaaaaggaacagccttctcattataagtatcatgaaaagcactatgccaatgcagctatatttgcagattctaaaaaccagaaaaccatttgtcagcaagctgttgacacagttctggccaagaaaagagtagactctctccagcttaccagggagcagatgttgacaaataggttcaatgaccttctggacagaatggacataatgtttggctcaactggatctgcagatatagaggagtggatggctggagtggcctggctgcactgtctcctccctaaaatggacagtgtagtctatgacttccttaagtgtatggtctataatatccctaaaaagagatactggttgttcaagggacccattgattcagggaaaactacccttgctgctgcacttctggaactctgtggtgggaaagctctcaatgtcaacctgccacttgatagactcaactttgagctgggggtggcaattgatcagtttttggtagtgtttgaagatgtgaaaggtacaggaggagagtccagggatttgcctagtggccaaggcatcaacaatctggacaacctcagagactacctggatgggtctgtaaaggtcaaccttgaaaaaaagcatctcaacaagaggactcaaatatttccacctggaatagtcactatgaatgaatattcagtgcccaagaccctccaggctagatttgtcaagcaaattgatttcagacctaaagattatctgaaacattgtttggagaggagtgagttcctccttgagaaaaggattattcagtcaggaatagcactgcttcttatgctgatatggtatagaccagtggctgagtttgcccaaagcattcagagtagaatagttgagtggaaagaaaggcttgacaaggagttttctctttcagtatatcaaaagatgaagttcaatgtggctatgggtattggagtgcttgattggttgagaaacagtgatgatgatgatgaagattctcaggaaaatgctgataaaaatgaggatgggggagagaagaatatggaagattctggtcatgaaactggcattgatagtcagagccaggggagtttccaggctccacagagctcccaaagtgtccatgaccacaaccagccttaccatatatgcagaggttttacttgtttcaagaaacctcccactccccctccagaacctgaaacatgagcggccgcgactctagatcataatcagccataccacacctccccctgaacctgaaaaatcaatgcaattattgttgaaataaagcacccagcaatgcctgggaccatgtaaaactgtcctggttctttccaaggtatagagcatagcccacaggctgatatttctggccagggttggttggaggacagccttgtctataggaagagaatgaggtttttgcactataagggcatgcaagtcagtcccgcccctaactccacctggttgcccatcccgcccctaactccgcccagttccgcccattctccgccccatggctgactaattttttttatttatgcagaggcggaggccgcctcggcctctgagctattccagaagtagtgaggaggcttttttggaggcccttaattaaattgacatatctacctaatttgtgtataataaccctgataaatgcttcaataatattgaaaaaggaagagtcctgtataaaaagaaccagctgtggaatgtgtgtcagttagtaggcttatgcaaagtagcccgcccaagagacaggctgaggcccgcccaccatgatagaacaagatggacttcatgctggatctcctgcagcatgggtggaaagactttttggttatgattgggctcagcagaccattggatgttctgatgctgctgtgttcaggcttagtgcacagggtaggccagtgctctttgtgaagactgatctctctggagctttgaatgaactgcaggatgaggctgctaggctttcatggctggccaccacaggtgtcccttgtgctgcagtgttggatgtggttactgaggctgggagggattggctcctcctgggagaagtgccaggtcaggatctgttgagttctcacctggctccagctgaaaaagtctccataatggcagatgctatgagaaggctgcacacattggacccagctacatgcccatttgaccatcaggccaaacacaggattgagagggccagaacaagaatggaggctgggttggtggaccaggatgaccttgatgaggagcatcagggcctggctccagctgaattgtttgccaggctcaaggctagtatgcctgatggggaggatctggtggtaactcatggtgatgcctgtttgcctaacatcatggtggaaaatggaaggttctctggattcattgattgtggaagactgggtgtagctgacaggtatcaggacatagctcttgcaacaagggatattgcagaggagttgggtggagaatgggctgacaggttcctggtcttgtatggcattgctgccccagacagccaaagaattgctttctataggctgttggatgagtttttctaagctcagcacccacaaagctctcaggtcctaagagacactggcacccatatccatgcatcccttgtataaataaagcatccagcaaagctggtaccatgtaaaactgtcttggttgtttccaaggtatagagcatagctcaataggtttttgactttgtcccgcccctctaagtcctgcacacagatactccaatatgacatacagcatgcttgggaactgagtgcccccatgtgggcagagagcaccatgtgccacagtccctgagaagttcttgggaagggtgggcaattgccatgtgtgcctagagaaggttgtttgtaatactgccaagtgccatgtggtgtgatattggctccatgtgccttgtttgtaataacatttccatgtgtcttgggaagaaccatatataagcagagctggtttagtgaaccctcagataggcctagaccatggccagcagtgagaatgtcataacagagttcatgagattcaaggtgaggatggagggaactgtcaatggtcatgagtttgagattgaaggggaaggggagggcagaccctatgagggccacaacacagtcaaattgaaggtgaccaaagggggaccccttccctttgcctgggacatcctgagcccacagtttcagtatggttccaaagtttatgtaaagcaccctgctgacatccctgactacaagaaactgtccttcccagaaggattcaagtgggaaagggtcatgaactttgaggatggaggggttgcaacagtgacccaggacagttctctccaagatggctgtttcatctacaaggtaaaattcattggtgtgaactttccctctgatggcccagtgatgcaaaaaaagaccatgggctgggaagcctcaacagaaaggctgtaccctagagatggagttctcaagggtgagacccacaaagctctaaagctcaaagatgggggccactatctggtggagttcaagagcatctacatggcaaaaaagccagtgcagttgcctggctattactatgtggatgccaagcttgacataacctcacacaatgaagactacactattgtggaacagtatgagaggactgagggaagacatcatctgtttctgtgaattcgcactgcatggacttacctgcctggtggtatcagtcacaggctctgataaggattcagctgttgtataaataaagcatgcagcctagcaggaaccatgttaatctctcttggttgtttccttggaatactcctaagcacattaggtttttagatctgtagaaaagatcaaaggatcttcttgagatcctttttttctgcgcgtaatctgctgcttgcaaacaaaaaaaccaccgctaccagcggtggtttgtttgccggatcaagagctaccaactctttttccgaaggtaactggcttcagcagagcgcagataccaaatactgtccttctagtgtagccgtagttaggccaccacttcaagaactctgtagcaccgcctacatacctcgctctgctaatcctgttaccagtggctgctgccagtggcgataagtcgtgtcttaccgggttggactcaagacgatagttaccggataaggcgcagcggtcgggctgaacggggggttcgtgcacacagcccagcttggagcgaacgacctacaccgaactgagatacctacagcgtgagctatgagaaagcgccacgcttcccgaagggagaaaggcggacaggtatccggtaagcggcagggtcggaacaggagagcgcacgagggagcttccagggggaaacgcctggtatctttatagtcctgtcgggtttcgccacctctgacttgagcgtcgatttttgtgatgctcgtcaggggggcggagcctatggaaaaacgccagcaacgcggcctttttacgg

SEQ ID NO: 671 - DNA, 7742 bp, Artificial Sequence
  pCMV/E2F-zGFP-I-T(E107K)-BB3
ttcctattaatagtaatcaattacggggtcattagttcatagcccatatatggagttccgcgttacataacttacggtaaatggcccgcctggctgaccgcccaacgacccccgcccattgacgtcaataatgacgtatgttcccatagtaacgccaatagggactttccattgacgtcaatgggtggagtatttacggtaaactgcccacttggcagtacatcaagtgtatcatttgccaagtacgccccctattgacgtcaatgacggtaaatggcccgcctggcattatgcccagtacatgaccttatgggactttcctacttggcagtacatctacgtattagtcatcgctattaccatggtgatgcggttttggcagtacatcaatgggcgtggatagcggtttgactcacggggatttccaagtctccaccccattgacgtcaatgggagtttgttttggcaccaaaatcaacgggactttccaaaatgtcgtaacaactccgccccattgacgcaaatgggcggtaggcgtgtacggtgggaggcatatggacaaagcctgcgcgcgccccgccccgccattggccgtaccgccccgcgccgccgccccatctcgcccctcgccgccgggtccggcgcgttaaagccaataggaaccgccgccgttgttccctcacggccgccgccgggtccggcgcgttaaagccaataggaaccgccgccgttgttcccgtcacggccggggcagccaattgtggcggcgctcggcggctcgtggctctttcgcggcaaaaaggatttggcgcgtaaaagtggccgggactttgcaggcagcggcggccgggggcggagcgggatcgagccctcgatgatatcagatcatccgatcccggtggactgaaaatgagacatattatctgccacggaggtgttattaccgaagaaatggccgccagtcttttgcaaccagctgatcgaagagggctagctagaccatggtgagcaagggagaggaactctttacaggtgtggtcccaattctggtggagctggatggagatgtgaatgggcacaaattttctgtcagtggagagggagagggggatgctacctatggcaaactgactctgaagttcatctgcactactggcaagctgcctgtgccatggccaactctggtgacaaccctcacctatggagtccagtgcttttccagatatcctgaccacatgaaacagcatgactttttcaaatctgcaatgcctgagggctatgtgcaagagagaactatctttttcaaggatgatgggaactataagactagggctgaggtgaaatttgaaggagacaccctggtcaataggattgagctcaaggggattgacttcaaggaggatggcaacattctgggccataagctggagtataattacaattcccacaatgtctacattatggctgacaagcagaagaatggcattaaggtcaacttcaagattagacacaacatagaggatggatctgtgcagctggctgaccattaccagcagaatacacctattggggatgggccagtgctgctccctgacaatcactatctgagcacccaatctgctttgtctaaagatcctaatgaaaagagagatcacatggtgctgctggagtttgtaactgctgcaggaattaccttgggtatggatgaactctataagtaaggatccgcccctctccctcccccccccctaacgttactggccgaagccgcttggaataaggccggtgtgcgtttgtctatatgttattttccaccatattgccgtcttttggcaatgtgagggcccggaaacctggccctgtcttcttgacgagcattcctaggggtctttcccctctcgccaaaggaatgcaaggtctgttgaatgtcgtgaaggaagcagttcctctggaagcttcttgaagacaaacaacgtctgtagcgaccctttgcaggcagcggaaccccccacctggcgacaggtgcctctgcggccaaaagccacgtgtataagatacacctgcaaaggcggcacaaccccagtgccacgttgtgagttggatagttgtggaaagagtcaaatggctctcctcaagcgtattcaacaaggggctgaaggatgcccagaaggtaccccattgtatgggatctgatctggggcctcggtgcacatgctttacatgtgtttagtcgaggttaaaaaaacgtctaggccccccgaaccacggggacgtggttttcctttgaaaaacacgatgataatatggccacaaccatggacaaagtgctgaatagggaggaaagtctgcaactgatggatctgttgggacttgagaggtctgcatggggtaatatcccacttatgaggaaagcatacctgaagaagtgtaaagagttccatcctgacaaaggtggagatgaagagaagatgaaaaagatgaacacactgtataagaaaatggaagatggtgtaaagtatgctcaccagccagattttggaggtttttgggatgccacagagatacctacttatggtacagatgagtgggaacagtggtggaatgcatttaatgaagagaatttgttttgctctaaggaaatgcctagttctgatgatgaggccacagctgactcccagcacagtactccacccaagaaaaagagaaaagtggaagacccaaaggatttcccctctgaactcttgtccttcttgtctcatgcagtgttctcaaataggaccctggcttgctttgctatctacactactaaggagaaggcagctctcttgtacaagaaaatcatggaaaagtattctgtcacctttatttccaggcacaactcctataatcataatattctctttttcttgacaccccataggcatagggtgagtgcaattaacaactatgctcagaagttgtgtactttctccttcctgatctgtaagggtgtgaataaggagtatctcatgtattcagccctgaccagagacccctttagtgtgattgaagaatccctgcctggtgggctcaaggagcatgatttcaacccagaagaggctgaagaaacaaaacaggtgagctggaagcttgtgactgaatatgcaatggagacaaagtgtgatgatgtcctgctcctcctgggaatgtacctggaatttcagtatagctttgaaatgtgtctgaaatgtatcaaaaaggaacagccttctcattataagtatcatgaaaagcactatgccaatgcagctatatttgcagattctaaaaaccagaaaaccatttgtcagcaagctgttgacacagttctggccaagaaaagagtagactctctccagcttaccagggagcagatgttgacaaataggttcaatgaccttctggacagaatggacataatgtttggctcaactggatctgcagatatagaggagtggatggctggagtggcctggctgcactgtctcctccctaaaatggacagtgtagtctatgacttccttaagtgtatggtctataatatccctaaaaagagatactggttgttcaagggacccattgattcagggaaaactacccttgctgctgcacttctggaactctgtggtgggaaagctctcaatgtcaacctgccacttgatagactcaactttgagctgggggtggcaattgatcagtttttggtagtgtttgaagatgtgaaaggtacaggaggagagtccagggatttgcctagtggccaaggcatcaacaatctggacaacctcagagactacctggatgggtctgtaaaggtcaaccttgaaaaaaagcatctcaacaagaggactcaaatatttccacctggaatagtcactatgaatgaatattcagtgcccaagaccctccaggctagatttgtcaagcaaattgatttcagacctaaagattatctgaaacattgtttggagaggagtgagttcctccttgagaaaaggattattcagtcaggaatagcactgcttcttatgctgatatggtatagaccagtggctgagtttgcccaaagcattcagagtagaatagttgagtggaaagaaaggcttgacaaggagttttctctttcagtatatcaaaagatgaagttcaatgtggctatgggtattggagtgcttgattggttgagaaacagtgatgatgatgatgaagattctcaggaaaatgctgataaaaatgaggatgggggagagaagaatatggaagattctggtcatgaaactggcattgatagtcagagccaggggagtttccaggctccacagagctcccaaagtgtccatgaccacaaccagccttaccatatatgcagaggttttacttgtttcaagaaacctcccactccccctccagaacctgaaacatgagcggccgcgactctagatcataatcagccataccacacctccccctgaacctgaaaaatcaatgcaattattgttgaaataaagcacccagcaatgcctgggaccatgtaaaactgtcctggttctttccaaggtatagagcatagcccacaggctgatatttctggccagggttggttggaggacagccttgtctataggaagagaatgaggtttttgcactataagggcatgcaagtcagtcccgcccctaactccacctggttgcccatcccgcccctaactccgcccagttccgcccattctccgccccatggctgactaattttttttatttatgcagaggcggaggccgcctcggcctctgagctattccagaagtagtgaggaggcttttttggaggcccttaattaaattgacatatctacctaatttgtgtataataaccctgataaatgcttcaataatattgaaaaaggaagagtcctgtataaaaagaaccagctgtggaatgtgtgtcagttagtaggcttatgcaaagtagcccgcccaagagacaggctgaggcccgcccaccatgatagaacaagatggacttcatgctggatctcctgcagcatgggtggaaagactttttggttatgattgggctcagcagaccattggatgttctgatgctgctgtgttcaggcttagtgcacagggtaggccagtgctctttgtgaagactgatctctctggagctttgaatgaactgcaggatgaggctgctaggctttcatggctggccaccacaggtgtcccttgtgctgcagtgttggatgtggttactgaggctgggagggattggctcctcctgggagaagtgccaggtcaggatctgttgagttctcacctggctccagctgaaaaagtctccataatggcagatgctatgagaaggctgcacacattggacccagctacatgcccatttgaccatcaggccaaacacaggattgagagggccagaacaagaatggaggctgggttggtggaccaggatgaccttgatgaggagcatcagggcctggctccagctgaattgtttgccaggctcaaggctagtatgcctgatggggaggatctggtggtaactcatggtgatgcctgtttgcctaacatcatggtggaaaatggaaggttctctggattcattgattgtggaagactgggtgtagctgacaggtatcaggacatagctcttgcaacaagggatattgcagaggagttgggtggagaatgggctgacaggttcctggtcttgtatggcattgctgccccagacagccaaagaattgctttctataggctgttggatgagtttttctaagctcagcacccacaaagctctcaggtcctaagagacactggcacccatatccatgcatcccttgtataaataaagcatccagcaaagctggtaccatgtaaaactgtcttggttgtttccaaggtatagagcatagctcaataggtttttgactttgtcccgcccctctaagtcctgcacacagatactccaatatgacatacagcatgcttgggaactgagtgcccccatgtgggcagagagcaccatgtgccacagtccctgagaagttcttgggaagggtgggcaattgccatgtgtgcctagagaaggttgtttgtaatactgccaagtgccatgtggtgtgatattggctccatgtgccttgtttgtaataacatttccatgtgtcttgggaagaaccatatataagcagagctggtttagtgaaccctcagataggcctagaccatggccagcagtgagaatgtcataacagagttcatgagattcaaggtgaggatggagggaactgtcaatggtcatgagtttgagattgaaggggaaggggagggcagaccctatgagggccacaacacagtcaaattgaaggtgaccaaagggggaccccttccctttgcctgggacatcctgagcccacagtttcagtatggttccaaagtttatgtaaagcaccctgctgacatccctgactacaagaaactgtccttcccagaaggattcaagtgggaaagggtcatgaactttgaggatggaggggttgcaacagtgacccaggacagttctctccaagatggctgtttcatctacaaggtaaaattcattggtgtgaactttccctctgatggcccagtgatgcaaaaaaagaccatgggctgggaagcctcaacagaaaggctgtaccctagagatggagttctcaagggtgagacccacaaagctctaaagctcaaagatgggggccactatctggtggagttcaagagcatctacatggcaaaaaagccagtgcagttgcctggctattactatgtggatgccaagcttgacataacctcacacaatgaagactacactattgtggaacagtatgagaggactgagggaagacatcatctgtttctgtgaattcgcactgcatggacttacctgcctggtggtatcagtcacaggctctgataaggattcagctgttgtataaataaagcatgcagcctagcaggaaccatgttaatctctcttggttgtttccttggaatactcctaagcacattaggtttttagatctgtagaaaagatcaaaggatcttcttgagatcctttttttctgcgcgtaatctgctgcttgcaaacaaaaaaaccaccgctaccagcggtggtttgtttgccggatcaagagctaccaactctttttccgaaggtaactggcttcagcagagcgcagataccaaatactgtccttctagtgtagccgtagttaggccaccacttcaagaactctgtagcaccgcctacatacctcgctctgctaatcctgttaccagtggctgctgccagtggcgataagtcgtgtcttaccgggttggactcaagacgatagttaccggataaggcgcagcggtcgggctgaacggggggttcgtgcacacagcccagcttggagcgaacgacctacaccgaactgagatacctacagcgtgagctatgagaaagcgccacgcttcccgaagggagaaaggcggacaggtatccggtaagcggcagggtcggaacaggagagcgcacgagggagcttccagggggaaacgcctggtatctttatagtcctgtcgggtttcgccacctctgacttgagcgtcgatttttgtgatgctcgtcaggggggcggagcctatggaaaaacgccagcaacgcggcctttttacgg

SEQ ID NO: 672 - DNA, 7742 bp, Artificial Sequence
  pCMV/E2F-zGFP-I-T(L103P/C105A)-BB3
ttcctattaatagtaatcaattacggggtcattagttcatagcccatatatggagttccgcgttacataacttacggtaaatggcccgcctggctgaccgcccaacgacccccgcccattgacgtcaataatgacgtatgttcccatagtaacgccaatagggactttccattgacgtcaatgggtggagtatttacggtaaactgcccacttggcagtacatcaagtgtatcatttgccaagtacgccccctattgacgtcaatgacggtaaatggcccgcctggcattatgcccagtacatgaccttatgggactttcctacttggcagtacatctacgtattagtcatcgctattaccatggtgatgcggttttggcagtacatcaatgggcgtggatagcggtttgactcacggggatttccaagtctccaccccattgacgtcaatgggagtttgttttggcaccaaaatcaacgggactttccaaaatgtcgtaacaactccgccccattgacgcaaatgggcggtaggcgtgtacggtgggaggcatatggacaaagcctgcgcgcgccccgccccgccattggccgtaccgccccgcgccgccgccccatctcgcccctcgccgccgggtccggcgcgttaaagccaataggaaccgccgccgttgttccctcacggccgccgccgggtccggcgcgttaaagccaataggaaccgccgccgttgttcccgtcacggccggggcagccaattgtggcggcgctcggcggctcgtggctctttcgcggcaaaaaggatttggcgcgtaaaagtggccgggactttgcaggcagcggcggccgggggcggagcgggatcgagccctcgatgatatcagatcatccgatcccggtggactgaaaatgagacatattatctgccacggaggtgttattaccgaagaaatggccgccagtcttttgcaaccagctgatcgaagagggctagctagaccatggtgagcaagggagaggaactctttacaggtgtggtcccaattctggtggagctggatggagatgtgaatgggcacaaattttctgtcagtggagagggagagggggatgctacctatggcaaactgactctgaagttcatctgcactactggcaagctgcctgtgccatggccaactctggtgacaaccctcacctatggagtccagtgcttttccagatatcctgaccacatgaaacagcatgactttttcaaatctgcaatgcctgagggctatgtgcaagagagaactatctttttcaaggatgatgggaactataagactagggctgaggtgaaatttgaaggagacaccctggtcaataggattgagctcaaggggattgacttcaaggaggatggcaacattctgggccataagctggagtataattacaattcccacaatgtctacattatggctgacaagcagaagaatggcattaaggtcaacttcaagattagacacaacatagaggatggatctgtgcagctggctgaccattaccagcagaatacacctattggggatgggccagtgctgctccctgacaatcactatctgagcacccaatctgctttgtctaaagatcctaatgaaaagagagatcacatggtgctgctggagtttgtaactgctgcaggaattaccttgggtatggatgaactctataagtaaggatccgcccctctccctcccccccccctaacgttactggccgaagccgcttggaataaggccggtgtgcgtttgtctatatgttattttccaccatattgccgtcttttggcaatgtgagggcccggaaacctggccctgtcttcttgacgagcattcctaggggtctttcccctctcgccaaaggaatgcaaggtctgttgaatgtcgtgaaggaagcagttcctctggaagcttcttgaagacaaacaacgtctgtagcgaccctttgcaggcagcggaaccccccacctggcgacaggtgcctctgcggccaaaagccacgtgtataagatacacctgcaaaggcggcacaaccccagtgccacgttgtgagttggatagttgtggaaagagtcaaatggctctcctcaagcgtattcaacaaggggctgaaggatgcccagaaggtaccccattgtatgggatctgatctggggcctcggtgcacatgctttacatgtgtttagtcgaggttaaaaaaacgtctaggccccccgaaccacggggacgtggttttcctttgaaaaacacgatgataatatggccacaaccatggacaaagtgctgaatagggaggaaagtctgcaactgatggatctgttgggacttgagaggtctgcatggggtaatatcccacttatgaggaaagcatacctgaagaagtgtaaagagttccatcctgacaaaggtggagatgaagagaagatgaaaaagatgaacacactgtataagaaaatggaagatggtgtaaagtatgctcaccagccagattttggaggtttttgggatgccacagagatacctacttatggtacagatgagtgggaacagtggtggaatgcatttaatgaagagaatccgtttgcctctgaggaaatgcctagttctgatgatgaggccacagctgactcccagcacagtactccacccaagaaaaagagaaaagtggaagacccaaaggatttcccctctgaactcttgtccttcttgtctcatgcagtgttctcaaataggaccctggcttgctttgctatctacactactaaggagaaggcagctctcttgtacaagaaaatcatggaaaagtattctgtcacctttatttccaggcacaactcctataatcataatattctctttttcttgacaccccataggcatagggtgagtgcaattaacaactatgctcagaagttgtgtactttctccttcctgatctgtaagggtgtgaataaggagtatctcatgtattcagccctgaccagagacccctttagtgtgattgaagaatccctgcctggtgggctcaaggagcatgatttcaacccagaagaggctgaagaaacaaaacaggtgagctggaagcttgtgactgaatatgcaatggagacaaagtgtgatgatgtcctgctcctcctgggaatgtacctggaatttcagtatagctttgaaatgtgtctgaaatgtatcaaaaaggaacagccttctcattataagtatcatgaaaagcactatgccaatgcagctatatttgcagattctaaaaaccagaaaaccatttgtcagcaagctgttgacacagttctggccaagaaaagagtagactctctccagcttaccagggagcagatgttgacaaataggttcaatgaccttctggacagaatggacataatgtttggctcaactggatctgcagatatagaggagtggatggctggagtggcctggctgcactgtctcctccctaaaatggacagtgtagtctatgacttccttaagtgtatggtctataatatccctaaaaagagatactggttgttcaagggacccattgattcagggaaaactacccttgctgctgcacttctggaactctgtggtgggaaagctctcaatgtcaacctgccacttgatagactcaactttgagctgggggtggcaattgatcagtttttggtagtgtttgaagatgtgaaaggtacaggaggagagtccagggatttgcctagtggccaaggcatcaacaatctggacaacctcagagactacctggatgggtctgtaaaggtcaaccttgaaaaaaagcatctcaacaagaggactcaaatatttccacctggaatagtcactatgaatgaatattcagtgcccaagaccctccaggctagatttgtcaagcaaattgatttcagacctaaagattatctgaaacattgtttggagaggagtgagttcctccttgagaaaaggattattcagtcaggaatagcactgcttcttatgctgatatggtatagaccagtggctgagtttgcccaaagcattcagagtagaatagttgagtggaaagaaaggcttgacaaggagttttctctttcagtatatcaaaagatgaagttcaatgtggctatgggtattggagtgcttgattggttgagaaacagtgatgatgatgatgaagattctcaggaaaatgctgataaaaatgaggatgggggagagaagaatatggaagattctggtcatgaaactggcattgatagtcagagccaggggagtttccaggctccacagagctcccaaagtgtccatgaccacaaccagccttaccatatatgcagaggttttacttgtttcaagaaacctcccactccccctccagaacctgaaacatgagcggccgcgactctagatcataatcagccataccacacctccccctgaacctgaaaaatcaatgcaattattgttgaaataaagcacccagcaatgcctgggaccatgtaaaactgtcctggttctttccaaggtatagagcatagcccacaggctgatatttctggccagggttggttggaggacagccttgtctataggaagagaatgaggtttttgcactataagggcatgcaagtcagtcccgcccctaactccacctggttgcccatcccgcccctaactccgcccagttccgcccattctccgccccatggctgactaattttttttatttatgcagaggcggaggccgcctcggcctctgagctattccagaagtagtgaggaggcttttttggaggcccttaattaaattgacatatctacctaatttgtgtataataaccctgataaatgcttcaataatattgaaaaaggaagagtcctgtataaaaagaaccagctgtggaatgtgtgtcagttagtaggcttatgcaaagtagcccgcccaagagacaggctgaggcccgcccaccatgatagaacaagatggacttcatgctggatctcctgcagcatgggtggaaagactttttggttatgattgggctcagcagaccattggatgttctgatgctgctgtgttcaggcttagtgcacagggtaggccagtgctctttgtgaagactgatctctctggagctttgaatgaactgcaggatgaggctgctaggctttcatggctggccaccacaggtgtcccttgtgctgcagtgttggatgtggttactgaggctgggagggattggctcctcctgggagaagtgccaggtcaggatctgttgagttctcacctggctccagctgaaaaagtctccataatggcagatgctatgagaaggctgcacacattggacccagctacatgcccatttgaccatcaggccaaacacaggattgagagggccagaacaagaatggaggctgggttggtggaccaggatgaccttgatgaggagcatcagggcctggctccagctgaattgtttgccaggctcaaggctagtatgcctgatggggaggatctggtggtaactcatggtgatgcctgtttgcctaacatcatggtggaaaatggaaggttctctggattcattgattgtggaagactgggtgtagctgacaggtatcaggacatagctcttgcaacaagggatattgcagaggagttgggtggagaatgggctgacaggttcctggtcttgtatggcattgctgccccagacagccaaagaattgctttctataggctgttggatgagtttttctaagctcagcacccacaaagctctcaggtcctaagagacactggcacccatatccatgcatcccttgtataaataaagcatccagcaaagctggtaccatgtaaaactgtcttggttgtttccaaggtatagagcatagctcaataggtttttgactttgtcccgcccctctaagtcctgcacacagatactccaatatgacatacagcatgcttgggaactgagtgcccccatgtgggcagagagcaccatgtgccacagtccctgagaagttcttgggaagggtgggcaattgccatgtgtgcctagagaaggttgtttgtaatactgccaagtgccatgtggtgtgatattggctccatgtgccttgtttgtaataacatttccatgtgtcttgggaagaaccatatataagcagagctggtttagtgaaccctcagataggcctagaccatggccagcagtgagaatgtcataacagagttcatgagattcaaggtgaggatggagggaactgtcaatggtcatgagtttgagattgaaggggaaggggagggcagaccctatgagggccacaacacagtcaaattgaaggtgaccaaagggggaccccttccctttgcctgggacatcctgagcccacagtttcagtatggttccaaagtttatgtaaagcaccctgctgacatccctgactacaagaaactgtccttcccagaaggattcaagtgggaaagggtcatgaactttgaggatggaggggttgcaacagtgacccaggacagttctctccaagatggctgtttcatctacaaggtaaaattcattggtgtgaactttccctctgatggcccagtgatgcaaaaaaagaccatgggctgggaagcctcaacagaaaggctgtaccctagagatggagttctcaagggtgagacccacaaagctctaaagctcaaagatgggggccactatctggtggagttcaagagcatctacatggcaaaaaagccagtgcagttgcctggctattactatgtggatgccaagcttgacataacctcacacaatgaagactacactattgtggaacagtatgagaggactgagggaagacatcatctgtttctgtgaattcgcactgcatggacttacctgcctggtggtatcagtcacaggctctgataaggattcagctgttgtataaataaagcatgcagcctagcaggaaccatgttaatctctcttggttgtttccttggaatactcctaagcacattaggtttttagatctgtagaaaagatcaaaggatcttcttgagatcctttttttctgcgcgtaatctgctgcttgcaaacaaaaaaaccaccgctaccagcggtggtttgtttgccggatcaagagctaccaactctttttccgaaggtaactggcttcagcagagcgcagataccaaatactgtccttctagtgtagccgtagttaggccaccacttcaagaactctgtagcaccgcctacatacctcgctctgctaatcctgttaccagtggctgctgccagtggcgataagtcgtgtcttaccgggttggactcaagacgatagttaccggataaggcgcagcggtcgggctgaacggggggttcgtgcacacagcccagcttggagcgaacgacctacaccgaactgagatacctacagcgtgagctatgagaaagcgccacgcttcccgaagggagaaaggcggacaggtatccggtaagcggcagggtcggaacaggagagcgcacgagggagcttccagggggaaacgcctggtatctttatagtcctgtcgggtttcgccacctctgacttgagcgtcgatttttgtgatgctcgtcaggggggcggagcctatggaaaaacgccagcaacgcggcctttttacgg

SEQ ID NO: 673 - DNA, 7742 bp, Artificial Sequence
  pCMV/E2F-zGFP-I-T(L103P/E107K)-BB3
ttcctattaatagtaatcaattacggggtcattagttcatagcccatatatggagttccgcgttacataacttacggtaaatggcccgcctggctgaccgcccaacgacccccgcccattgacgtcaataatgacgtatgttcccatagtaacgccaatagggactttccattgacgtcaatgggtggagtatttacggtaaactgcccacttggcagtacatcaagtgtatcatttgccaagtacgccccctattgacgtcaatgacggtaaatggcccgcctggcattatgcccagtacatgaccttatgggactttcctacttggcagtacatctacgtattagtcatcgctattaccatggtgatgcggttttggcagtacatcaatgggcgtggatagcggtttgactcacggggatttccaagtctccaccccattgacgtcaatgggagtttgttttggcaccaaaatcaacgggactttccaaaatgtcgtaacaactccgccccattgacgcaaatgggcggtaggcgtgtacggtgggaggcatatggacaaagcctgcgcgcgccccgccccgccattggccgtaccgccccgcgccgccgccccatctcgcccctcgccgccgggtccggcgcgttaaagccaataggaaccgccgccgttgttccctcacggccgccgccgggtccggcgcgttaaagccaataggaaccgccgccgttgttcccgtcacggccggggcagccaattgtggcggcgctcggcggctcgtggctctttcgcggcaaaaaggatttggcgcgtaaaagtggccgggactttgcaggcagcggcggccgggggcggagcgggatcgagccctcgatgatatcagatcatccgatcccggtggactgaaaatgagacatattatctgccacggaggtgttattaccgaagaaatggccgccagtcttttgcaaccagctgatcgaagagggctagctagaccatggtgagcaagggagaggaactctttacaggtgtggtcccaattctggtggagctggatggagatgtgaatgggcacaaattttctgtcagtggagagggagagggggatgctacctatggcaaactgactctgaagttcatctgcactactggcaagctgcctgtgccatggccaactctggtgacaaccctcacctatggagtccagtgcttttccagatatcctgaccacatgaaacagcatgactttttcaaatctgcaatgcctgagggctatgtgcaagagagaactatctttttcaaggatgatgggaactataagactagggctgaggtgaaatttgaaggagacaccctggtcaataggattgagctcaaggggattgacttcaaggaggatggcaacattctgggccataagctggagtataattacaattcccacaatgtctacattatggctgacaagcagaagaatggcattaaggtcaacttcaagattagacacaacatagaggatggatctgtgcagctggctgaccattaccagcagaatacacctattggggatgggccagtgctgctccctgacaatcactatctgagcacccaatctgctttgtctaaagatcctaatgaaaagagagatcacatggtgctgctggagtttgtaactgctgcaggaattaccttgggtatggatgaactctataagtaaggatccgcccctctccctcccccccccctaacgttactggccgaagccgcttggaataaggccggtgtgcgtttgtctatatgttattttccaccatattgccgtcttttggcaatgtgagggcccggaaacctggccctgtcttcttgacgagcattcctaggggtctttcccctctcgccaaaggaatgcaaggtctgttgaatgtcgtgaaggaagcagttcctctggaagcttcttgaagacaaacaacgtctgtagcgaccctttgcaggcagcggaaccccccacctggcgacaggtgcctctgcggccaaaagccacgtgtataagatacacctgcaaaggcggcacaaccccagtgccacgttgtgagttggatagttgtggaaagagtcaaatggctctcctcaagcgtattcaacaaggggctgaaggatgcccagaaggtaccccattgtatgggatctgatctggggcctcggtgcacatgctttacatgtgtttagtcgaggttaaaaaaacgtctaggccccccgaaccacggggacgtggttttcctttgaaaaacacgatgataatatggccacaaccatggacaaagtgctgaatagggaggaaagtctgcaactgatggatctgttgggacttgagaggtctgcatggggtaatatcccacttatgaggaaagcatacctgaagaagtgtaaagagttccatcctgacaaaggtggagatgaagagaagatgaaaaagatgaacacactgtataagaaaatggaagatggtgtaaagtatgctcaccagccagattttggaggtttttgggatgccacagagatacctacttatggtacagatgagtgggaacagtggtggaatgcatttaatgaagagaatcccttttgctctaaggaaatgcctagttctgatgatgaggccacagctgactcccagcacagtactccacccaagaaaaagagaaaagtggaagacccaaaggatttcccctctgaactcttgtccttcttgtctcatgcagtgttctcaaataggaccctggcttgctttgctatctacactactaaggagaaggcagctctcttgtacaagaaaatcatggaaaagtattctgtcacctttatttccaggcacaactcctataatcataatattctctttttcttgacaccccataggcatagggtgagtgcaattaacaactatgctcagaagttgtgtactttctccttcctgatctgtaagggtgtgaataaggagtatctcatgtattcagccctgaccagagacccctttagtgtgattgaagaatccctgcctggtgggctcaaggagcatgatttcaacccagaagaggctgaagaaacaaaacaggtgagctggaagcttgtgactgaatatgcaatggagacaaagtgtgatgatgtcctgctcctcctgggaatgtacctggaatttcagtatagctttgaaatgtgtctgaaatgtatcaaaaaggaacagccttctcattataagtatcatgaaaagcactatgccaatgcagctatatttgcagattctaaaaaccagaaaaccatttgtcagcaagctgttgacacagttctggccaagaaaagagtagactctctccagcttaccagggagcagatgttgacaaataggttcaatgaccttctggacagaatggacataatgtttggctcaactggatctgcagatatagaggagtggatggctggagtggcctggctgcactgtctcctccctaaaatggacagtgtagtctatgacttccttaagtgtatggtctataatatccctaaaaagagatactggttgttcaagggacccattgattcagggaaaactacccttgctgctgcacttctggaactctgtggtgggaaagctctcaatgtcaacctgccacttgatagactcaactttgagctgggggtggcaattgatcagtttttggtagtgtttgaagatgtgaaaggtacaggaggagagtccagggatttgcctagtggccaaggcatcaacaatctggacaacctcagagactacctggatgggtctgtaaaggtcaaccttgaaaaaaagcatctcaacaagaggactcaaatatttccacctggaatagtcactatgaatgaatattcagtgcccaagaccctccaggctagatttgtcaagcaaattgatttcagacctaaagattatctgaaacattgtttggagaggagtgagttcctccttgagaaaaggattattcagtcaggaatagcactgcttcttatgctgatatggtatagaccagtggctgagtttgcccaaagcattcagagtagaatagttgagtggaaagaaaggcttgacaaggagttttctctttcagtatatcaaaagatgaagttcaatgtggctatgggtattggagtgcttgattggttgagaaacagtgatgatgatgatgaagattctcaggaaaatgctgataaaaatgaggatgggggagagaagaatatggaagattctggtcatgaaactggcattgatagtcagagccaggggagtttccaggctccacagagctcccaaagtgtccatgaccacaaccagccttaccatatatgcagaggttttacttgtttcaagaaacctcccactccccctccagaacctgaaacatgagcggccgcgactctagatcataatcagccataccacacctccccctgaacctgaaaaatcaatgcaattattgttgaaataaagcacccagcaatgcctgggaccatgtaaaactgtcctggttctttccaaggtatagagcatagcccacaggctgatatttctggccagggttggttggaggacagccttgtctataggaagagaatgaggtttttgcactataagggcatgcaagtcagtcccgcccctaactccacctggttgcccatcccgcccctaactccgcccagttccgcccattctccgccccatggctgactaattttttttatttatgcagaggcggaggccgcctcggcctctgagctattccagaagtagtgaggaggcttttttggaggcccttaattaaattgacatatctacctaatttgtgtataataaccctgataaatgcttcaataatattgaaaaaggaagagtcctgtataaaaagaaccagctgtggaatgtgtgtcagttagtaggcttatgcaaagtagcccgcccaagagacaggctgaggcccgcccaccatgatagaacaagatggacttcatgctggatctcctgcagcatgggtggaaagactttttggttatgattgggctcagcagaccattggatgttctgatgctgctgtgttcaggcttagtgcacagggtaggccagtgctctttgtgaagactgatctctctggagctttgaatgaactgcaggatgaggctgctaggctttcatggctggccaccacaggtgtcccttgtgctgcagtgttggatgtggttactgaggctgggagggattggctcctcctgggagaagtgccaggtcaggatctgttgagttctcacctggctccagctgaaaaagtctccataatggcagatgctatgagaaggctgcacacattggacccagctacatgcccatttgaccatcaggccaaacacaggattgagagggccagaacaagaatggaggctgggttggtggaccaggatgaccttgatgaggagcatcagggcctggctccagctgaattgtttgccaggctcaaggctagtatgcctgatggggaggatctggtggtaactcatggtgatgcctgtttgcctaacatcatggtggaaaatggaaggttctctggattcattgattgtggaagactgggtgtagctgacaggtatcaggacatagctcttgcaacaagggatattgcagaggagttgggtggagaatgggctgacaggttcctggtcttgtatggcattgctgccccagacagccaaagaattgctttctataggctgttggatgagtttttctaagctcagcacccacaaagctctcaggtcctaagagacactggcacccatatccatgcatcccttgtataaataaagcatccagcaaagctggtaccatgtaaaactgtcttggttgtttccaaggtatagagcatagctcaataggtttttgactttgtcccgcccctctaagtcctgcacacagatactccaatatgacatacagcatgcttgggaactgagtgcccccatgtgggcagagagcaccatgtgccacagtccctgagaagttcttgggaagggtgggcaattgccatgtgtgcctagagaaggttgtttgtaatactgccaagtgccatgtggtgtgatattggctccatgtgccttgtttgtaataacatttccatgtgtcttgggaagaaccatatataagcagagctggtttagtgaaccctcagataggcctagaccatggccagcagtgagaatgtcataacagagttcatgagattcaaggtgaggatggagggaactgtcaatggtcatgagtttgagattgaaggggaaggggagggcagaccctatgagggccacaacacagtcaaattgaaggtgaccaaagggggaccccttccctttgcctgggacatcctgagcccacagtttcagtatggttccaaagtttatgtaaagcaccctgctgacatccctgactacaagaaactgtccttcccagaaggattcaagtgggaaagggtcatgaactttgaggatggaggggttgcaacagtgacccaggacagttctctccaagatggctgtttcatctacaaggtaaaattcattggtgtgaactttccctctgatggcccagtgatgcaaaaaaagaccatgggctgggaagcctcaacagaaaggctgtaccctagagatggagttctcaagggtgagacccacaaagctctaaagctcaaagatgggggccactatctggtggagttcaagagcatctacatggcaaaaaagccagtgcagttgcctggctattactatgtggatgccaagcttgacataacctcacacaatgaagactacactattgtggaacagtatgagaggactgagggaagacatcatctgtttctgtgaattcgcactgcatggacttacctgcctggtggtatcagtcacaggctctgataaggattcagctgttgtataaataaagcatgcagcctagcaggaaccatgttaatctctcttggttgtttccttggaatactcctaagcacattaggtttttagatctgtagaaaagatcaaaggatcttcttgagatcctttttttctgcgcgtaatctgctgcttgcaaacaaaaaaaccaccgctaccagcggtggtttgtttgccggatcaagagctaccaactctttttccgaaggtaactggcttcagcagagcgcagataccaaatactgtccttctagtgtagccgtagttaggccaccacttcaagaactctgtagcaccgcctacatacctcgctctgctaatcctgttaccagtggctgctgccagtggcgataagtcgtgtcttaccgggttggactcaagacgatagttaccggataaggcgcagcggtcgggctgaacggggggttcgtgcacacagcccagcttggagcgaacgacctacaccgaactgagatacctacagcgtgagctatgagaaagcgccacgcttcccgaagggagaaaggcggacaggtatccggtaagcggcagggtcggaacaggagagcgcacgagggagcttccagggggaaacgcctggtatctttatagtcctgtcgggtttcgccacctctgacttgagcgtcgatttttgtgatgctcgtcaggggggcggagcctatggaaaaacgccagcaacgcggcctttttacgg

SEQ ID NO: 674 - DNA, 7742 bp, Artificial Sequence
  pCMV/E2F-zGFP-I-T(C105A/E107K)-BB3
ttcctattaatagtaatcaattacggggtcattagttcatagcccatatatggagttccgcgttacataacttacggtaaatggcccgcctggctgaccgcccaacgacccccgcccattgacgtcaataatgacgtatgttcccatagtaacgccaatagggactttccattgacgtcaatgggtggagtatttacggtaaactgcccacttggcagtacatcaagtgtatcatttgccaagtacgccccctattgacgtcaatgacggtaaatggcccgcctggcattatgcccagtacatgaccttatgggactttcctacttggcagtacatctacgtattagtcatcgctattaccatggtgatgcggttttggcagtacatcaatgggcgtggatagcggtttgactcacggggatttccaagtctccaccccattgacgtcaatgggagtttgttttggcaccaaaatcaacgggactttccaaaatgtcgtaacaactccgccccattgacgcaaatgggcggtaggcgtgtacggtgggaggcatatggacaaagcctgcgcgcgccccgccccgccattggccgtaccgccccgcgccgccgccccatctcgcccctcgccgccgggtccggcgcgttaaagccaataggaaccgccgccgttgttccctcacggccgccgccgggtccggcgcgttaaagccaataggaaccgccgccgttgttcccgtcacggccggggcagccaattgtggcggcgctcggcggctcgtggctctttcgcggcaaaaaggatttggcgcgtaaaagtggccgggactttgcaggcagcggcggccgggggcggagcgggatcgagccctcgatgatatcagatcatccgatcccggtggactgaaaatgagacatattatctgccacggaggtgttattaccgaagaaatggccgccagtcttttgcaaccagctgatcgaagagggctagctagaccatggtgagcaagggagaggaactctttacaggtgtggtcccaattctggtggagctggatggagatgtgaatgggcacaaattttctgtcagtggagagggagagggggatgctacctatggcaaactgactctgaagttcatctgcactactggcaagctgcctgtgccatggccaactctggtgacaaccctcacctatggagtccagtgcttttccagatatcctgaccacatgaaacagcatgactttttcaaatctgcaatgcctgagggctatgtgcaagagagaactatctttttcaaggatgatgggaactataagactagggctgaggtgaaatttgaaggagacaccctggtcaataggattgagctcaaggggattgacttcaaggaggatggcaacattctgggccataagctggagtataattacaattcccacaatgtctacattatggctgacaagcagaagaatggcattaaggtcaacttcaagattagacacaacatagaggatggatctgtgcagctggctgaccattaccagcagaatacacctattggggatgggccagtgctgctccctgacaatcactatctgagcacccaatctgctttgtctaaagatcctaatgaaaagagagatcacatggtgctgctggagtttgtaactgctgcaggaattaccttgggtatggatgaactctataagtaaggatccgcccctctccctcccccccccctaacgttactggccgaagccgcttggaataaggccggtgtgcgtttgtctatatgttattttccaccatattgccgtcttttggcaatgtgagggcccggaaacctggccctgtcttcttgacgagcattcctaggggtctttcccctctcgccaaaggaatgcaaggtctgttgaatgtcgtgaaggaagcagttcctctggaagcttcttgaagacaaacaacgtctgtagcgaccctttgcaggcagcggaaccccccacctggcgacaggtgcctctgcggccaaaagccacgtgtataagatacacctgcaaaggcggcacaaccccagtgccacgttgtgagttggatagttgtggaaagagtcaaatggctctcctcaagcgtattcaacaaggggctgaaggatgcccagaaggtaccccattgtatgggatctgatctggggcctcggtgcacatgctttacatgtgtttagtcgaggttaaaaaaacgtctaggccccccgaaccacggggacgtggttttcctttgaaaaacacgatgataatatggccacaaccatggacaaagtgctgaatagggaggaaagtctgcaactgatggatctgttgggacttgagaggtctgcatggggtaatatcccacttatgaggaaagcatacctgaagaagtgtaaagagttccatcctgacaaaggtggagatgaagagaagatgaaaaagatgaacacactgtataagaaaatggaagatggtgtaaagtatgctcaccagccagattttggaggtttttgggatgccacagagatacctacttatggtacagatgagtgggaacagtggtggaatgcatttaatgaagagaatttgtttgcctctaaggaaatgcctagttctgatgatgaggccacagctgactcccagcacagtactccacccaagaaaaagagaaaagtggaagacccaaaggatttcccctctgaactcttgtccttcttgtctcatgcagtgttctcaaataggaccctggcttgctttgctatctacactactaaggagaaggcagctctcttgtacaagaaaatcatggaaaagtattctgtcacctttatttccaggcacaactcctataatcataatattctctttttcttgacaccccataggcatagggtgagtgcaattaacaactatgctcagaagttgtgtactttctccttcctgatctgtaagggtgtgaataaggagtatctcatgtattcagccctgaccagagacccctttagtgtgattgaagaatccctgcctggtgggctcaaggagcatgatttcaacccagaagaggctgaagaaacaaaacaggtgagctggaagcttgtgactgaatatgcaatggagacaaagtgtgatgatgtcctgctcctcctgggaatgtacctggaatttcagtatagctttgaaatgtgtctgaaatgtatcaaaaaggaacagccttctcattataagtatcatgaaaagcactatgccaatgcagctatatttgcagattctaaaaaccagaaaaccatttgtcagcaagctgttgacacagttctggccaagaaaagagtagactctctccagcttaccagggagcagatgttgacaaataggttcaatgaccttctggacagaatggacataatgtttggctcaactggatctgcagatatagaggagtggatggctggagtggcctggctgcactgtctcctccctaaaatggacagtgtagtctatgacttccttaagtgtatggtctataatatccctaaaaagagatactggttgttcaagggacccattgattcagggaaaactacccttgctgctgcacttctggaactctgtggtgggaaagctctcaatgtcaacctgccacttgatagactcaactttgagctgggggtggcaattgatcagtttttggtagtgtttgaagatgtgaaaggtacaggaggagagtccagggatttgcctagtggccaaggcatcaacaatctggacaacctcagagactacctggatgggtctgtaaaggtcaaccttgaaaaaaagcatctcaacaagaggactcaaatatttccacctggaatagtcactatgaatgaatattcagtgcccaagaccctccaggctagatttgtcaagcaaattgatttcagacctaaagattatctgaaacattgtttggagaggagtgagttcctccttgagaaaaggattattcagtcaggaatagcactgcttcttatgctgatatggtatagaccagtggctgagtttgcccaaagcattcagagtagaatagttgagtggaaagaaaggcttgacaaggagttttctctttcagtatatcaaaagatgaagttcaatgtggctatgggtattggagtgcttgattggttgagaaacagtgatgatgatgatgaagattctcaggaaaatgctgataaaaatgaggatgggggagagaagaatatggaagattctggtcatgaaactggcattgatagtcagagccaggggagtttccaggctccacagagctcccaaagtgtccatgaccacaaccagccttaccatatatgcagaggttttacttgtttcaagaaacctcccactccccctccagaacctgaaacatgagcggccgcgactctagatcataatcagccataccacacctccccctgaacctgaaaaatcaatgcaattattgttgaaataaagcacccagcaatgcctgggaccatgtaaaactgtcctggttctttccaaggtatagagcatagcccacaggctgatatttctggccagggttggttggaggacagccttgtctataggaagagaatgaggtttttgcactataagggcatgcaagtcagtcccgcccctaactccacctggttgcccatcccgcccctaactccgcccagttccgcccattctccgccccatggctgactaattttttttatttatgcagaggcggaggccgcctcggcctctgagctattccagaagtagtgaggaggcttttttggaggcccttaattaaattgacatatctacctaatttgtgtataataaccctgataaatgcttcaataatattgaaaaaggaagagtcctgtataaaaagaaccagctgtggaatgtgtgtcagttagtaggcttatgcaaagtagcccgcccaagagacaggctgaggcccgcccaccatgatagaacaagatggacttcatgctggatctcctgcagcatgggtggaaagactttttggttatgattgggctcagcagaccattggatgttctgatgctgctgtgttcaggcttagtgcacagggtaggccagtgctctttgtgaagactgatctctctggagctttgaatgaactgcaggatgaggctgctaggctttcatggctggccaccacaggtgtcccttgtgctgcagtgttggatgtggttactgaggctgggagggattggctcctcctgggagaagtgccaggtcaggatctgttgagttctcacctggctccagctgaaaaagtctccataatggcagatgctatgagaaggctgcacacattggacccagctacatgcccatttgaccatcaggccaaacacaggattgagagggccagaacaagaatggaggctgggttggtggaccaggatgaccttgatgaggagcatcagggcctggctccagctgaattgtttgccaggctcaaggctagtatgcctgatggggaggatctggtggtaactcatggtgatgcctgtttgcctaacatcatggtggaaaatggaaggttctctggattcattgattgtggaagactgggtgtagctgacaggtatcaggacatagctcttgcaacaagggatattgcagaggagttgggtggagaatgggctgacaggttcctggtcttgtatggcattgctgccccagacagccaaagaattgctttctataggctgttggatgagtttttctaagctcagcacccacaaagctctcaggtcctaagagacactggcacccatatccatgcatcccttgtataaataaagcatccagcaaagctggtaccatgtaaaactgtcttggttgtttccaaggtatagagcatagctcaataggtttttgactttgtcccgcccctctaagtcctgcacacagatactccaatatgacatacagcatgcttgggaactgagtgcccccatgtgggcagagagcaccatgtgccacagtccctgagaagttcttgggaagggtgggcaattgccatgtgtgcctagagaaggttgtttgtaatactgccaagtgccatgtggtgtgatattggctccatgtgccttgtttgtaataacatttccatgtgtcttgggaagaaccatatataagcagagctggtttagtgaaccctcagataggcctagaccatggccagcagtgagaatgtcataacagagttcatgagattcaaggtgaggatggagggaactgtcaatggtcatgagtttgagattgaaggggaaggggagggcagaccctatgagggccacaacacagtcaaattgaaggtgaccaaagggggaccccttccctttgcctgggacatcctgagcccacagtttcagtatggttccaaagtttatgtaaagcaccctgctgacatccctgactacaagaaactgtccttcccagaaggattcaagtgggaaagggtcatgaactttgaggatggaggggttgcaacagtgacccaggacagttctctccaagatggctgtttcatctacaaggtaaaattcattggtgtgaactttccctctgatggcccagtgatgcaaaaaaagaccatgggctgggaagcctcaacagaaaggctgtaccctagagatggagttctcaagggtgagacccacaaagctctaaagctcaaagatgggggccactatctggtggagttcaagagcatctacatggcaaaaaagccagtgcagttgcctggctattactatgtggatgccaagcttgacataacctcacacaatgaagactacactattgtggaacagtatgagaggactgagggaagacatcatctgtttctgtgaattcgcactgcatggacttacctgcctggtggtatcagtcacaggctctgataaggattcagctgttgtataaataaagcatgcagcctagcaggaaccatgttaatctctcttggttgtttccttggaatactcctaagcacattaggtttttagatctgtagaaaagatcaaaggatcttcttgagatcctttttttctgcgcgtaatctgctgcttgcaaacaaaaaaaccaccgctaccagcggtggtttgtttgccggatcaagagctaccaactctttttccgaaggtaactggcttcagcagagcgcagataccaaatactgtccttctagtgtagccgtagttaggccaccacttcaagaactctgtagcaccgcctacatacctcgctctgctaatcctgttaccagtggctgctgccagtggcgataagtcgtgtcttaccgggttggactcaagacgatagttaccggataaggcgcagcggtcgggctgaacggggggttcgtgcacacagcccagcttggagcgaacgacctacaccgaactgagatacctacagcgtgagctatgagaaagcgccacgcttcccgaagggagaaaggcggacaggtatccggtaagcggcagggtcggaacaggagagcgcacgagggagcttccagggggaaacgcctggtatctttatagtcctgtcgggtttcgccacctctgacttgagcgtcgatttttgtgatgctcgtcaggggggcggagcctatggaaaaacgccagcaacgcggcctttttacgg

SEQ ID NO: 675 - DNA, 7684 bp, Artificial Sequence
  pCMV/EF1/E2F(wt)-zGFP-I-T-BB3
ttcctattaatggagtcaatgggaaaaacccattggagccaagtacactgactcaatagggactttccattgggttttgcccagtacataaggtcaatagggggtgagtcaacaggaaagtcccattggagccaagtacattgagtcaatagggactttccaatgggttttgcccagtacataaggtcaatgggaggtaagccaatgggtttttcccattactgacatgtatactgagtcattagggactttccaatgggttttgcccagtacataaggtcaataggggtgaatcaacaggaaagtcccattggagccaagtacactgagtcaatagggactttccattgggttttgcccagtacaaaaggtcaatagggggtgagtcaatgggtttttcccattattggcacatacataaggtcaataggggtgactagtggagaagagcatgcttgagggctgagtgcccctcagtgggcagagagcacatggcccacagtccctgagaagttggggggaggggtgggcaattgaactggtgcctagagaaggtggggcttgggtaaactgggaaagtgatgtggtgtactggctccacctttttccccagggtgggggagaaccatatataagtgcagtagtctctgtgaacattccataatcctgcgcgcgccccgccccgccattggccgtaccgccccgcgccgccgccccatctcgcccctcgccgccgggtccggcgcgttaaagccaataggaaccgccgccgttgttcccgtcacggccggggcagccaattgtggcggcgctcggcggctcgtggctctttcgcggcaaaaaggatttggcgcgtaaaagtggccgggactttgcaggcagcggcggccgggggcggagcgggatcgagccctcgccgtggcctgccgccgctagctagaccatggtgagcaagggagaggaactctttacaggtgtggtcccaattctggtggagctggatggagatgtgaatgggcacaaattttctgtcagtggagagggagagggggatgctacctatggcaaactgactctgaagttcatctgcactactggcaagctgcctgtgccatggccaactctggtgacaaccctcacctatggagtccagtgcttttccagatatcctgaccacatgaaacagcatgactttttcaaatctgcaatgcctgagggctatgtgcaagagagaactatctttttcaaggatgatgggaactataagactagggctgaggtgaaatttgaaggagacaccctggtcaataggattgagctcaaggggattgacttcaaggaggatggcaacattctgggccataagctggagtataattacaattcccacaatgtctacattatggctgacaagcagaagaatggcattaaggtcaacttcaagattagacacaacatagaggatggatctgtgcagctggctgaccattaccagcagaatacacctattggggatgggccagtgctgctccctgacaatcactatctgagcacccaatctgctttgtctaaagatcctaatgaaaagagagatcacatggtgctgctggagtttgtaactgctgcaggaattaccttgggtatggatgaactctataagtaaggatccgcccctctccctcccccccccctaacgttactggccgaagccgcttggaataaggccggtgtgcgtttgtctatatgttattttccaccatattgccgtcttttggcaatgtgagggcccggaaacctggccctgtcttcttgacgagcattcctaggggtctttcccctctcgccaaaggaatgcaaggtctgttgaatgtcgtgaaggaagcagttcctctggaagcttcttgaagacaaacaacgtctgtagcgaccctttgcaggcagcggaaccccccacctggcgacaggtgcctctgcggccaaaagccacgtgtataagatacacctgcaaaggcggcacaaccccagtgccacgttgtgagttggatagttgtggaaagagtcaaatggctctcctcaagcgtattcaacaaggggctgaaggatgcccagaaggtaccccattgtatgggatctgatctggggcctcggtgcacatgctttacatgtgtttagtcgaggttaaaaaaacgtctaggccccccgaaccacggggacgtggttttcctttgaaaaacacgatgataatatggccacaaccatggacaaagtgctgaatagggaggaaagtctgcaactgatggatctgttgggacttgagaggtctgcatggggtaatatcccacttatgaggaaagcatacctgaagaagtgtaaagagttccatcctgacaaaggtggagatgaagagaagatgaaaaagatgaacacactgtataagaaaatggaagatggtgtaaagtatgctcaccagccagattttggaggtttttgggatgccacagagatacctacttatggtacagatgagtgggaacagtggtggaatgcatttaatgaagagaatttgttttgctctgaggaaatgcctagttctgatgatgaggccacagctgactcccagcacagtactccacccaagaaaaagagaaaagtggaagacccaaaggatttcccctctgaactcttgtccttcttgtctcatgcagtgttctcaaataggaccctggcttgctttgctatctacactactaaggagaaggcagctctcttgtacaagaaaatcatggaaaagtattctgtcacctttatttccaggcacaactcctataatcataatattctctttttcttgacaccccataggcatagggtgagtgcaattaacaactatgctcagaagttgtgtactttctccttcctgatctgtaagggtgtgaataaggagtatctcatgtattcagccctgaccagagacccctttagtgtgattgaagaatccctgcctggtgggctcaaggagcatgatttcaacccagaagaggctgaagaaacaaaacaggtgagctggaagcttgtgactgaatatgcaatggagacaaagtgtgatgatgtcctgctcctcctgggaatgtacctggaatttcagtatagctttgaaatgtgtctgaaatgtatcaaaaaggaacagccttctcattataagtatcatgaaaagcactatgccaatgcagctatatttgcagattctaaaaaccagaaaaccatttgtcagcaagctgttgacacagttctggccaagaaaagagtagactctctccagcttaccagggagcagatgttgacaaataggttcaatgaccttctggacagaatggacataatgtttggctcaactggatctgcagatatagaggagtggatggctggagtggcctggctgcactgtctcctccctaaaatggacagtgtagtctatgacttccttaagtgtatggtctataatatccctaaaaagagatactggttgttcaagggacccattgattcagggaaaactacccttgctgctgcacttctggaactctgtggtgggaaagctctcaatgtcaacctgccacttgatagactcaactttgagctgggggtggcaattgatcagtttttggtagtgtttgaagatgtgaaaggtacaggaggagagtccagggatttgcctagtggccaaggcatcaacaatctggacaacctcagagactacctggatgggtctgtaaaggtcaaccttgaaaaaaagcatctcaacaagaggactcaaatatttccacctggaatagtcactatgaatgaatattcagtgcccaagaccctccaggctagatttgtcaagcaaattgatttcagacctaaagattatctgaaacattgtttggagaggagtgagttcctccttgagaaaaggattattcagtcaggaatagcactgcttcttatgctgatatggtatagaccagtggctgagtttgcccaaagcattcagagtagaatagttgagtggaaagaaaggcttgacaaggagttttctctttcagtatatcaaaagatgaagttcaatgtggctatgggtattggagtgcttgattggttgagaaacagtgatgatgatgatgaagattctcaggaaaatgctgataaaaatgaggatgggggagagaagaatatggaagattctggtcatgaaactggcattgatagtcagagccaggggagtttccaggctccacagagctcccaaagtgtccatgaccacaaccagccttaccatatatgcagaggttttacttgtttcaagaaacctcccactccccctccagaacctgaaacatgagcggccgcgactctagatcataatcagccataccacacctccccctgaacctgaaaaatcaatgcaattattgttgaaataaagcacccagcaatgcctgggaccatgtaaaactgtcctggttctttccaaggtatagagcatagcccacaggctgatatttctggccagggttggttggaggacagccttgtctataggaagagaatgaggtttttgcactataagggcatgcaagtcagtcccgcccctaactccacctggttgcccatcccgcccctaactccgcccagttccgcccattctccgccccatggctgactaattttttttatttatgcagaggcggaggccgcctcggcctctgagctattccagaagtagtgaggaggcttttttggaggcccttaattaaattgacatatctacctaatttgtgtataataaccctgataaatgcttcaataatattgaaaaaggaagagtcctgtataaaaagaaccagctgtggaatgtgtgtcagttagtaggcttatgcaaagtagcccgcccaagagacaggctgaggcccgcccaccatgatagaacaagatggacttcatgctggatctcctgcagcatgggtggaaagactttttggttatgattgggctcagcagaccattggatgttctgatgctgctgtgttcaggcttagtgcacagggtaggccagtgctctttgtgaagactgatctctctggagctttgaatgaactgcaggatgaggctgctaggctttcatggctggccaccacaggtgtcccttgtgctgcagtgttggatgtggttactgaggctgggagggattggctcctcctgggagaagtgccaggtcaggatctgttgagttctcacctggctccagctgaaaaagtctccataatggcagatgctatgagaaggctgcacacattggacccagctacatgcccatttgaccatcaggccaaacacaggattgagagggccagaacaagaatggaggctgggttggtggaccaggatgaccttgatgaggagcatcagggcctggctccagctgaattgtttgccaggctcaaggctagtatgcctgatggggaggatctggtggtaactcatggtgatgcctgtttgcctaacatcatggtggaaaatggaaggttctctggattcattgattgtggaagactgggtgtagctgacaggtatcaggacatagctcttgcaacaagggatattgcagaggagttgggtggagaatgggctgacaggttcctggtcttgtatggcattgctgccccagacagccaaagaattgctttctataggctgttggatgagtttttctaagctcagcacccacaaagctctcaggtcctaagagacactggcacccatatccatgcatcccttgtataaataaagcatccagcaaagctggtaccatgtaaaactgtcttggttgtttccaaggtatagagcatagctcaataggtttttgactttgtcccgcccctctaagtcctgcacacagatactccaatatgacatacagcatgcttgggaactgagtgcccccatgtgggcagagagcaccatgtgccacagtccctgagaagttcttgggaagggtgggcaattgccatgtgtgcctagagaaggttgtttgtaatactgccaagtgccatgtggtgtgatattggctccatgtgccttgtttgtaataacatttccatgtgtcttgggaagaaccatatataagcagagctggtttagtgaaccctcagataggcctagaccatggccagcagtgagaatgtcataacagagttcatgagattcaaggtgaggatggagggaactgtcaatggtcatgagtttgagattgaaggggaaggggagggcagaccctatgagggccacaacacagtcaaattgaaggtgaccaaagggggaccccttccctttgcctgggacatcctgagcccacagtttcagtatggttccaaagtttatgtaaagcaccctgctgacatccctgactacaagaaactgtccttcccagaaggattcaagtgggaaagggtcatgaactttgaggatggaggggttgcaacagtgacccaggacagttctctccaagatggctgtttcatctacaaggtaaaattcattggtgtgaactttccctctgatggcccagtgatgcaaaaaaagaccatgggctgggaagcctcaacagaaaggctgtaccctagagatggagttctcaagggtgagacccacaaagctctaaagctcaaagatgggggccactatctggtggagttcaagagcatctacatggcaaaaaagccagtgcagttgcctggctattactatgtggatgccaagcttgacataacctcacacaatgaagactacactattgtggaacagtatgagaggactgagggaagacatcatctgtttctgtgaattcgcactgcatggacttacctgcctggtggtatcagtcacaggctctgataaggattcagctgttgtataaataaagcatgcagcctagcaggaaccatgttaatctctcttggttgtttccttggaatactcctaagcacattaggtttttagatctgtagaaaagatcaaaggatcttcttgagatcctttttttctgcgcgtaatctgctgcttgcaaacaaaaaaaccaccgctaccagcggtggtttgtttgccggatcaagagctaccaactctttttccgaaggtaactggcttcagcagagcgcagataccaaatactgtccttctagtgtagccgtagttaggccaccacttcaagaactctgtagcaccgcctacatacctcgctctgctaatcctgttaccagtggctgctgccagtggcgataagtcgtgtcttaccgggttggactcaagacgatagttaccggataaggcgcagcggtcgggctgaacggggggttcgtgcacacagcccagcttggagcgaacgacctacaccgaactgagatacctacagcgtgagctatgagaaagcgccacgcttcccgaagggagaaaggcggacaggtatccggtaagcggcagggtcggaacaggagagcgcacgagggagcttccagggggaaacgcctggtatctttatagtcctgtcgggtttcgccacctctgacttgagcgtcgatttttgtgatgctcgtcaggggggcggagcctatggaaaaacgccagcaacgcggcctttttacgg

SEQ ID NO: 676 - DNA, 7651 bp, Artificial Sequence
  pCMV/int-zGFP-I-T-BB3
ttcctattaatagtaatcaattacggggtcattagttcatagcccatatatggagttccgcgttacataacttacggtaaatggcccgcctggctgaccgcccaacgacccccgcccattgacgtcaataatgacgtatgttcccatagtaacgccaatagggactttccattgacgtcaatgggtggagtatttacggtaaactgcccacttggcagtacatcaagtgtatcatatgccaagtccgccccctattgacgtcaatgacggtaaatggcccgcctggcattatgcccagtacatgaccttacgggactttcctacttggcagtacatctacgtattagtcatcgctattaccatggtgatgcggttttggcagtacaccaatgggcgtggatagcggtttgactcacggggatttccaagtctccaccccattgacgtcaatgggagtttgttttggcaccaaaatcaacgggactttccaaaatgtcgtaataaccccgccccgttgacgcaaatgggcggtaggcgtgtacggtgggaggtctatataagcagagctcgtttagtgaaccgtcagatcactagaagctttattgcggtagtttatcacagttaaattgctaacgcagtcagtgcttctgacacaacagtctcgaacttaagctgcagaagttggtcgtgaggcactgggcaggtaagtatcaaggttacaagacaggtttaaggagaccaatagaaactgggcttgtcgagacagagaagactcttgcgtttctgataggcacctattggtcttactgacatccactttgcctttctctccacaggtgtccactcccagttcaattacagctcttaaggctagagtacttaatacgactcactataggctagctagaccatggtgagcaagggagaggaactctttacaggtgtggtcccaattctggtggagctggatggagatgtgaatgggcacaaattttctgtcagtggagagggagagggggatgctacctatggcaaactgactctgaagttcatctgcactactggcaagctgcctgtgccatggccaactctggtgacaaccctcacctatggagtccagtgcttttccagatatcctgaccacatgaaacagcatgactttttcaaatctgcaatgcctgagggctatgtgcaagagagaactatctttttcaaggatgatgggaactataagactagggctgaggtgaaatttgaaggagacaccctggtcaataggattgagctcaaggggattgacttcaaggaggatggcaacattctgggccataagctggagtataattacaattcccacaatgtctacattatggctgacaagcagaagaatggcattaaggtcaacttcaagattagacacaacatagaggatggatctgtgcagctggctgaccattaccagcagaatacacctattggggatgggccagtgctgctccctgacaatcactatctgagcacccaatctgctttgtctaaagatcctaatgaaaagagagatcacatggtgctgctggagtttgtaactgctgcaggaattaccttgggtatggatgaactctataagtaaggatccgcccctctccctcccccccccctaacgttactggccgaagccgcttggaataaggccggtgtgcgtttgtctatatgttattttccaccatattgccgtcttttggcaatgtgagggcccggaaacctggccctgtcttcttgacgagcattcctaggggtctttcccctctcgccaaaggaatgcaaggtctgttgaatgtcgtgaaggaagcagttcctctggaagcttcttgaagacaaacaacgtctgtagcgaccctttgcaggcagcggaaccccccacctggcgacaggtgcctctgcggccaaaagccacgtgtataagatacacctgcaaaggcggcacaaccccagtgccacgttgtgagttggatagttgtggaaagagtcaaatggctctcctcaagcgtattcaacaaggggctgaaggatgcccagaaggtaccccattgtatgggatctgatctggggcctcggtgcacatgctttacatgtgtttagtcgaggttaaaaaaacgtctaggccccccgaaccacggggacgtggttttcctttgaaaaacacgatgataatatggccacaaccatggacaaagtgctgaatagggaggaaagtctgcaactgatggatctgttgggacttgagaggtctgcatggggtaatatcccacttatgaggaaagcatacctgaagaagtgtaaagagttccatcctgacaaaggtggagatgaagagaagatgaaaaagatgaacacactgtataagaaaatggaagatggtgtaaagtatgctcaccagccagattttggaggtttttgggatgccacagagatacctacttatggtacagatgagtgggaacagtggtggaatgcatttaatgaagagaatttgttttgctctgaggaaatgcctagttctgatgatgaggccacagctgactcccagcacagtactccacccaagaaaaagagaaaagtggaagacccaaaggatttcccctctgaactcttgtccttcttgtctcatgcagtgttctcaaataggaccctggcttgctttgctatctacactactaaggagaaggcagctctcttgtacaagaaaatcatggaaaagtattctgtcacctttatttccaggcacaactcctataatcataatattctctttttcttgacaccccataggcatagggtgagtgcaattaacaactatgctcagaagttgtgtactttctccttcctgatctgtaagggtgtgaataaggagtatctcatgtattcagccctgaccagagacccctttagtgtgattgaagaatccctgcctggtgggctcaaggagcatgatttcaacccagaagaggctgaagaaacaaaacaggtgagctggaagcttgtgactgaatatgcaatggagacaaagtgtgatgatgtcctgctcctcctgggaatgtacctggaatttcagtatagctttgaaatgtgtctgaaatgtatcaaaaaggaacagccttctcattataagtatcatgaaaagcactatgccaatgcagctatatttgcagattctaaaaaccagaaaaccatttgtcagcaagctgttgacacagttctggccaagaaaagagtagactctctccagcttaccagggagcagatgttgacaaataggttcaatgaccttctggacagaatggacataatgtttggctcaactggatctgcagatatagaggagtggatggctggagtggcctggctgcactgtctcctccctaaaatggacagtgtagtctatgacttccttaagtgtatggtctataatatccctaaaaagagatactggttgttcaagggacccattgattcagggaaaactacccttgctgctgcacttctggaactctgtggtgggaaagctctcaatgtcaacctgccacttgatagactcaactttgagctgggggtggcaattgatcagtttttggtagtgtttgaagatgtgaaaggtacaggaggagagtccagggatttgcctagtggccaaggcatcaacaatctggacaacctcagagactacctggatgggtctgtaaaggtcaaccttgaaaaaaagcatctcaacaagaggactcaaatatttccacctggaatagtcactatgaatgaatattcagtgcccaagaccctccaggctagatttgtcaagcaaattgatttcagacctaaagattatctgaaacattgtttggagaggagtgagttcctccttgagaaaaggattattcagtcaggaatagcactgcttcttatgctgatatggtatagaccagtggctgagtttgcccaaagcattcagagtagaatagttgagtggaaagaaaggcttgacaaggagttttctctttcagtatatcaaaagatgaagttcaatgtggctatgggtattggagtgcttgattggttgagaaacagtgatgatgatgatgaagattctcaggaaaatgctgataaaaatgaggatgggggagagaagaatatggaagattctggtcatgaaactggcattgatagtcagagccaggggagtttccaggctccacagagctcccaaagtgtccatgaccacaaccagccttaccatatatgcagaggttttacttgtttcaagaaacctcccactccccctccagaacctgaaacatgagcggccgcgactctagatcataatcagccataccacacctccccctgaacctgaaaaatcaatgcaattattgttgaaataaagcacccagcaatgcctgggaccatgtaaaactgtcctggttctttccaaggtatagagcatagcccacaggctgatatttctggccagggttggttggaggacagccttgtctataggaagagaatgaggtttttgcactataagggcatgcaagtcagtcccgcccctaactccacctggttgcccatcccgcccctaactccgcccagttccgcccattctccgccccatggctgactaattttttttatttatgcagaggcggaggccgcctcggcctctgagctattccagaagtagtgaggaggcttttttggaggcccttaattaaattgacatatctacctaatttgtgtataataaccctgataaatgcttcaataatattgaaaaaggaagagtcctgtataaaaagaaccagctgtggaatgtgtgtcagttagtaggcttatgcaaagtagcccgcccaagagacaggctgaggcccgcccaccatgatagaacaagatggacttcatgctggatctcctgcagcatgggtggaaagactttttggttatgattgggctcagcagaccattggatgttctgatgctgctgtgttcaggcttagtgcacagggtaggccagtgctctttgtgaagactgatctctctggagctttgaatgaactgcaggatgaggctgctaggctttcatggctggccaccacaggtgtcccttgtgctgcagtgttggatgtggttactgaggctgggagggattggctcctcctgggagaagtgccaggtcaggatctgttgagttctcacctggctccagctgaaaaagtctccataatggcagatgctatgagaaggctgcacacattggacccagctacatgcccatttgaccatcaggccaaacacaggattgagagggccagaacaagaatggaggctgggttggtggaccaggatgaccttgatgaggagcatcagggcctggctccagctgaattgtttgccaggctcaaggctagtatgcctgatggggaggatctggtggtaactcatggtgatgcctgtttgcctaacatcatggtggaaaatggaaggttctctggattcattgattgtggaagactgggtgtagctgacaggtatcaggacatagctcttgcaacaagggatattgcagaggagttgggtggagaatgggctgacaggttcctggtcttgtatggcattgctgccccagacagccaaagaattgctttctataggctgttggatgagtttttctaagctcagcacccacaaagctctcaggtcctaagagacactggcacccatatccatgcatcccttgtataaataaagcatccagcaaagctggtaccatgtaaaactgtcttggttgtttccaaggtatagagcatagctcaataggtttttgactttgtcccgcccctctaagtcctgcacacagatactccaatatgacatacagcatgcttgggaactgagtgcccccatgtgggcagagagcaccatgtgccacagtccctgagaagttcttgggaagggtgggcaattgccatgtgtgcctagagaaggttgtttgtaatactgccaagtgccatgtggtgtgatattggctccatgtgccttgtttgtaataacatttccatgtgtcttgggaagaaccatatataagcagagctggtttagtgaaccctcagataggcctagaccatggccagcagtgagaatgtcataacagagttcatgagattcaaggtgaggatggagggaactgtcaatggtcatgagtttgagattgaaggggaaggggagggcagaccctatgagggccacaacacagtcaaattgaaggtgaccaaagggggaccccttccctttgcctgggacatcctgagcccacagtttcagtatggttccaaagtttatgtaaagcaccctgctgacatccctgactacaagaaactgtccttcccagaaggattcaagtgggaaagggtcatgaactttgaggatggaggggttgcaacagtgacccaggacagttctctccaagatggctgtttcatctacaaggtaaaattcattggtgtgaactttccctctgatggcccagtgatgcaaaaaaagaccatgggctgggaagcctcaacagaaaggctgtaccctagagatggagttctcaagggtgagacccacaaagctctaaagctcaaagatgggggccactatctggtggagttcaagagcatctacatggcaaaaaagccagtgcagttgcctggctattactatgtggatgccaagcttgacataacctcacacaatgaagactacactattgtggaacagtatgagaggactgagggaagacatcatctgtttctgtgaattcgcactgcatggacttacctgcctggtggtatcagtcacaggctctgataaggattcagctgttgtataaataaagcatgcagcctagcaggaaccatgttaatctctcttggttgtttccttggaatactcctaagcacattaggtttttagatctgtagaaaagatcaaaggatcttcttgagatcctttttttctgcgcgtaatctgctgcttgcaaacaaaaaaaccaccgctaccagcggtggtttgtttgccggatcaagagctaccaactctttttccgaaggtaactggcttcagcagagcgcagataccaaatactgtccttctagtgtagccgtagttaggccaccacttcaagaactctgtagcaccgcctacatacctcgctctgctaatcctgttaccagtggctgctgccagtggcgataagtcgtgtcttaccgggttggactcaagacgatagttaccggataaggcgcagcggtcgggctgaacggggggttcgtgcacacagcccagcttggagcgaacgacctacaccgaactgagatacctacagcgtgagctatgagaaagcgccacgcttcccgaagggagaaaggcggacaggtatccggtaagcggcagggtcggaacaggagagcgcacgagggagcttccagggggaaacgcctggtatctttatagtcctgtcgggtttcgccacctctgacttgagcgtcgatttttgtgatgctcgtcaggggggcggagcctatggaaaaacgccagcaacgcggcctttttacgg

SEQ ID NO: 677 - DNA, 8147 bp, Artificial Sequence
  pC-SEAP-I-T-BB3
ttcctattaatagtaatcaattacggggtcattagttcatagcccatatatggagttccgcgttacataacttacggtaaatggcccgcctggctgaccgcccaacgacccccgcccattgacgtcaataatgacgtatgttcccatagtaacgccaatagggactttccattgacgtcaatgggtggagtatttacggtaaactgcccacttggcagtacatcaagtgtatcatatgccaagtacgccccctattgacgtcaatgacggtaaatggcccgcctggcattatgcccagtacatgaccttatgggactttcctacttggcagtacatctacgtattagtcatcgctattaccatggtgatgcggttttggcagtacatcaatgggcgtggatagcggtttgactcacggggatttccaagtctccaccccattgacgtcaatgggagtttgttttggcaccaaaatcaacgggactttccaaaatgtcgtaacaactccgccccattgacgcaaatgggcggtaggcgtgtacggtgggaggtctatataagcagagctggtttagtgaaccgtcagatccgctagctaaccatgtggggtgcctgtctgctattgctgggcttaagtcttcaagtttgccccagtgtcattcctgtggaggaggagaatcctgctttttggaataggaaggcagctgaagccttggatgcagccaagaagctcaagcccattcagacatctgcaaagaatcttgtcatcctcatgggtgatggaatgggtgtctccactgtaacagccaccaggattctgaagggccagcaacaaggtcatctaggcccagagacccagttggcaatggacaggttccctcacatggccctttccaagacttacaacactgacaagcagattcctgactctgctgggacaggcacagcattcttgtgtggagtaaaaaccaacatgaaagtcattggtctttcagctgctgccagattcaaccagtgcaacaccacatggggcaatgaagtggtctctgtaatgcacagggccaaaaaagctgggaaaagtgtgggtgtggtgacaaccacctctgtccagcatgcctctcctgctggaacttatgcccacacagtgaacagaggttggtactctgatgctcagatgcctgcctcagctttacaagatggctgcaaggacatcagcacccagctcatctcaaacatggacatagatgtcatcttagggggtgggagaaagttcatgttcccaaaggggactcctgaccaggagtaccccacagacacaaagcaggctggcacaagattagatggtaggaaccttgtgcaagagtggcttgccaagcatcagggagcaaggtatgtctggaacaggagtgagctaatccaggcctctttgaacaggtctgtcactcacctaatggggttatttgagcccaatgacatgaagtatgagatacacagggaccctgcccaggacccctccttagcagaaatgactgaagttgctgtgaggatgttgtccagaaatccaaaagggttctacctctttgttgaggggggaaggattgatcatggtcaccatgagacagttgcttacagagccttaactgaggctgtgatgtttgattctgctgtggacaaggctgacaaactgacctctgagcaggacacaatgattctagtgactgctgaccacagtcatgttttctcctttgggggctacacccagaggggtgcttcaatctttggcctggcccctttcaaggcagaagatgggaagagtttcacctccatcctctatgggaatggtcctgggtacaagctgcacaatggggccagagctgatgtgacagaagaggagagctccaacccaacctaccagcagcaagcagcagtccctctttcttcagaaacccactctggggaagatgtggccatatttgccagaggcccccaagcccacttggtgcatggagttcaggagcagaattacatagctcatgtaatggcttttgctgcttgcttggagccctacacagactgtggcctagccagcccagcaggccagtcctctgcagtaagcccaggctagaggatccgcccctctccctcccccccccctaacgttactggccgaagccgcttggaataaggccggtgtgcgtttgtctatatgttattttccaccatattgccgtcttttggcaatgtgagggcccggaaacctggccctgtcttcttgacgagcattcctaggggtctttcccctctcgccaaaggaatgcaaggtctgttgaatgtcgtgaaggaagcagttcctctggaagcttcttgaagacaaacaacgtctgtagcgaccctttgcaggcagcggaaccccccacctggcgacaggtgcctctgcggccaaaagccacgtgtataagatacacctgcaaaggcggcacaaccccagtgccacgttgtgagttggatagttgtggaaagagtcaaatggctctcctcaagcgtattcaacaaggggctgaaggatgcccagaaggtaccccattgtatgggatctgatctggggcctcggtgcacatgctttacatgtgtttagtcgaggttaaaaaaacgtctaggccccccgaaccacggggacgtggttttcctttgaaaaacacgatgataatatggccacaaccatggacaaagtgctgaatagggaggaaagtctgcaactgatggatctgttgggacttgagaggtctgcatggggtaatatcccacttatgaggaaagcatacctgaagaagtgtaaagagttccatcctgacaaaggtggagatgaagagaagatgaaaaagatgaacacactgtataagaaaatggaagatggtgtaaagtatgctcaccagccagattttggaggtttttgggatgccacagagatacctacttatggtacagatgagtgggaacagtggtggaatgcatttaatgaagagaatttgttttgctctgaggaaatgcctagttctgatgatgaggccacagctgactcccagcacagtactccacccaagaaaaagagaaaagtggaagacccaaaggatttcccctctgaactcttgtccttcttgtctcatgcagtgttctcaaataggaccctggcttgctttgctatctacactactaaggagaaggcagctctcttgtacaagaaaatcatggaaaagtattctgtcacctttatttccaggcacaactcctataatcataatattctctttttcttgacaccccataggcatagggtgagtgcaattaacaactatgctcagaagttgtgtactttctccttcctgatctgtaagggtgtgaataaggagtatctcatgtattcagccctgaccagagacccctttagtgtgattgaagaatccctgcctggtgggctcaaggagcatgatttcaacccagaagaggctgaagaaacaaaacaggtgagctggaagcttgtgactgaatatgcaatggagacaaagtgtgatgatgtcctgctcctcctgggaatgtacctggaatttcagtatagctttgaaatgtgtctgaaatgtatcaaaaaggaacagccttctcattataagtatcatgaaaagcactatgccaatgcagctatatttgcagattctaaaaaccagaaaaccatttgtcagcaagctgttgacacagttctggccaagaaaagagtagactctctccagcttaccagggagcagatgttgacaaataggttcaatgaccttctggacagaatggacataatgtttggctcaactggatctgcagatatagaggagtggatggctggagtggcctggctgcactgtctcctccctaaaatggacagtgtagtctatgacttccttaagtgtatggtctataatatccctaaaaagagatactggttgttcaagggacccattgattcagggaaaactacccttgctgctgcacttctggaactctgtggtgggaaagctctcaatgtcaacctgccacttgatagactcaactttgagctgggggtggcaattgatcagtttttggtagtgtttgaagatgtgaaaggtacaggaggagagtccagggatttgcctagtggccaaggcatcaacaatctggacaacctcagagactacctggatgggtctgtaaaggtcaaccttgaaaaaaagcatctcaacaagaggactcaaatatttccacctggaatagtcactatgaatgaatattcagtgcccaagaccctccaggctagatttgtcaagcaaattgatttcagacctaaagattatctgaaacattgtttggagaggagtgagttcctccttgagaaaaggattattcagtcaggaatagcactgcttcttatgctgatatggtatagaccagtggctgagtttgcccaaagcattcagagtagaatagttgagtggaaagaaaggcttgacaaggagttttctctttcagtatatcaaaagatgaagttcaatgtggctatgggtattggagtgcttgattggttgagaaacagtgatgatgatgatgaagattctcaggaaaatgctgataaaaatgaggatgggggagagaagaatatggaagattctggtcatgaaactggcattgatagtcagagccaggggagtttccaggctccacagagctcccaaagtgtccatgaccacaaccagccttaccatatatgcagaggttttacttgtttcaagaaacctcccactccccctccagaacctgaaacatgagcggccgcgactctagatcataatcagccataccacacctccccctgaacctgaaaaatcaatgcaattattgttgaaataaagcacccagcaatgcctgggaccatgtaaaactgtcctggttctttccaaggtatagagcatagcccacaggctgatatttctggccagggttggttggaggacagccttgtctataggaagagaatgaggtttttgcactataagggcatgcaagtcagtcccgcccctaactccacctggttgcccatcccgcccctaactccgcccagttccgcccattctccgccccatggctgactaattttttttatttatgcagaggcggaggccgcctcggcctctgagctattccagaagtagtgaggaggcttttttggaggcccttaattaaattgacatatctacctaatttgtgtataataaccctgataaatgcttcaataatattgaaaaaggaagagtcctgtataaaaagaaccagctgtggaatgtgtgtcagttagtaggcttatgcaaagtagcccgcccaagagacaggctgaggcccgcccaccatgatagaacaagatggacttcatgctggatctcctgcagcatgggtggaaagactttttggttatgattgggctcagcagaccattggatgttctgatgctgctgtgttcaggcttagtgcacagggtaggccagtgctctttgtgaagactgatctctctggagctttgaatgaactgcaggatgaggctgctaggctttcatggctggccaccacaggtgtcccttgtgctgcagtgttggatgtggttactgaggctgggagggattggctcctcctgggagaagtgccaggtcaggatctgttgagttctcacctggctccagctgaaaaagtctccataatggcagatgctatgagaaggctgcacacattggacccagctacatgcccatttgaccatcaggccaaacacaggattgagagggccagaacaagaatggaggctgggttggtggaccaggatgaccttgatgaggagcatcagggcctggctccagctgaattgtttgccaggctcaaggctagtatgcctgatggggaggatctggtggtaactcatggtgatgcctgtttgcctaacatcatggtggaaaatggaaggttctctggattcattgattgtggaagactgggtgtagctgacaggtatcaggacatagctcttgcaacaagggatattgcagaggagttgggtggagaatgggctgacaggttcctggtcttgtatggcattgctgccccagacagccaaagaattgctttctataggctgttggatgagtttttctaagctcagcacccacaaagctctcaggtcctaagagacactggcacccatatccatgcatcccttgtataaataaagcatccagcaaagctggtaccatgtaaaactgtcttggttgtttccaaggtatagagcatagctcaataggtttttgactttgtcccgcccctctaagtcctgcacacagatactccaatatgacatacagcatgcttgggaactgagtgcccccatgtgggcagagagcaccatgtgccacagtccctgagaagttcttgggaagggtgggcaattgccatgtgtgcctagagaaggttgtttgtaatactgccaagtgccatgtggtgtgatattggctccatgtgccttgtttgtaataacatttccatgtgtcttgggaagaaccatatataagcagagctggtttagtgaaccctcagataggcctagaccatggccagcagtgagaatgtcataacagagttcatgagattcaaggtgaggatggagggaactgtcaatggtcatgagtttgagattgaaggggaaggggagggcagaccctatgagggccacaacacagtcaaattgaaggtgaccaaagggggaccccttccctttgcctgggacatcctgagcccacagtttcagtatggttccaaagtttatgtaaagcaccctgctgacatccctgactacaagaaactgtccttcccagaaggattcaagtgggaaagggtcatgaactttgaggatggaggggttgcaacagtgacccaggacagttctctccaagatggctgtttcatctacaaggtaaaattcattggtgtgaactttccctctgatggcccagtgatgcaaaaaaagaccatgggctgggaagcctcaacagaaaggctgtaccctagagatggagttctcaagggtgagacccacaaagctctaaagctcaaagatgggggccactatctggtggagttcaagagcatctacatggcaaaaaagccagtgcagttgcctggctattactatgtggatgccaagcttgacataacctcacacaatgaagactacactattgtggaacagtatgagaggactgagggaagacatcatctgtttctgtgaattcgcactgcatggacttacctgcctggtggtatcagtcacaggctctgataaggattcagctgttgtataaataaagcatgcagcctagcaggaaccatgttaatctctcttggttgtttccttggaatactcctaagcacattaggtttttagatctgtagaaaagatcaaaggatcttcttgagatcctttttttctgcgcgtaatctgctgcttgcaaacaaaaaaaccaccgctaccagcggtggtttgtttgccggatcaagagctaccaactctttttccgaaggtaactggcttcagcagagcgcagataccaaatactgtccttctagtgtagccgtagttaggccaccacttcaagaactctgtagcaccgcctacatacctcgctctgctaatcctgttaccagtggctgctgccagtggcgataagtcgtgtcttaccgggttggactcaagacgatagttaccggataaggcgcagcggtcgggctgaacggggggttcgtgcacacagcccagcttggagcgaacgacctacaccgaactgagatacctacagcgtgagctatgagaaagcgccacgcttcccgaagggagaaaggcggacaggtatccggtaagcggcagggtcggaacaggagagcgcacgagggagcttccagggggaaacgcctggtatctttatagtcctgtcgggtttcgccacctctgacttgagcgtcgatttttgtgatgctcgtcaggggggcggagcctatggaaaaacgccagcaacgcggcctttttacgg

SEQ ID NO: 678 - DNA, 13 bp, Artificial Sequence
  recognition sequence with ori linker
ggaggggaggagg

SEQ ID NO: 679 - DNA, 1378 bp, Artificial Sequence
  human Telomerase promoter region (TERT) with AseI (5') and NheI (3') flanking restriction sites
attaatatttacaagacgaggctaacctccagcgagcgtgacagcccagggagggtgcgtggcctgttcaaatgctagctccataaataaagcaatttcctccggcagtttctgaaagtaggaaaggttacatttaaggttgcgtttgttagcatttcagtgtttgccgacctcagctacagcatccctgcatggcctcgggagacccagaagtttctcgccccttagatccaaacttgagcaacccggagtctggattcctgggaagtcctcagctgtcctgcggttgtgccggggccccaggtctggaggggaccatgtgccgtgtggcttctactgctgggctggaagtcgggcctcctagctctgcagtccgaggcttggaggcaggtgcctggaccccgaggctgccctccaccctgtgcgggcgggatgtgaccagatgttggcctcatctgccaaacagagtgccggggcccagggtcaaggccgttgtggctggtgtgaggcgcccggtgcgcggccagcaggagcgcctggctccatttcccaccctttctcgacgggaccgccccggtgggtgattaacagatttggggtggtttgctcatggtggggacccctcgccgcctgagaacctgtaaagagaaatgacgggcctgtgtcagggagcccaagtcgcggggaagtgttgcagggaggcactccgggaggtcccgcgtgcccgtccaggggagcaatgcgtcctcggttcgtccccagccgcgtctacgcgcctccgtcctccccttcacgtccggcattcgtggtgcccggagcccgacgccccgcgtccggacctggaggcagccctgggtctccggatcaggccagcggccaaagggtcgccgcacgcacctgtttcccagggcctccacatcatggcccctccctcgggttaccccacagcctaggccgattcgacctctctccgctggggccctcgctggcgtccctgcaccctgggagcgtgagcggtgcgcgggcggggaaacgcggcccagaaccccgggtccgcccggagcagctgcgctgtcgggccaggccgggctcccagtggattcgcgggcacagacgcccaggaccgcgcttccacgtggcggaggactgggacccgggcaccgtcctgcccccttcaccttccagttccgcttcttccgcgcggaccccgccccgtcccgacccttcccgggtccccggcccagccccttccgggccctcccagcccttccccttcctttccgcggccccgccctctcctcgcggcgcgagtttcaggcagcgctgcgtcctgctgcgcacgtgggaagccctggccccggccacccccgcggctagc

SEQ ID NO: 680 - DNA, 279 bp, Artificial Sequence
  Synthesized WT E2F1 promoter with flanking Ase1 (5) and Nhe1 (3) restriction sites
attaatgcctgcgcgcgccccgccccgccattggccgtaccgccccgcgccgccgccccatctcgcccctcgccgccgggtccggcgcgttaaagccaataggaaccgccgccgttgttcccgtcacggccggggcagccaattgtggcggcgctcggcggctcgtggctctttcgcggcaaaaaggatttggcgcgtaaaagtggccgggactttgcaggcagcggcggccgggggcggagcgggatcgagccctcgccgaggcctgccgccgctagc

SEQ ID NO: 681 - DNA, 279 bp, Artificial Sequence
  Synthesized WT E2F1 promoter (A262T point mutation) with flanking Ase1 (5) and Nhe1 (3) restriction sites
attaatgcctgcgcgcgccccgccccgccattggccgtaccgccccgcgccgccgccccatctcgcccctcgccgccgggtccggcgcgttaaagccaataggaaccgccgccgttgttcccgtcacggccggggcagccaattgtggcggcgctcggcggctcgtggctctttcgcggcaaaaaggatttggcgcgtaaaagtggccgggactttgcaggcagcggcggccgggggcggagcgggatcgagccctcgccgtggcctgccgccgctagc

SEQ ID NO: 682 - DNA, 279 bp, Artificial Sequence
  Synthesized WT E2F1 promoter (TCG reduced) with flanking Ase1 (5) and Nhe1 (3) restriction sites
attaatgcctgcgcgcgccccgccccgccattggccgtaccgccccgcgccgccgccccatcacgccccttgccgccgggtccggcgcgttaaagccaataggaaccgccgccgttgttcccgtcacggccggggcagccaattgtggcggcgcccggcggcccgtggctctttggcgggagataggatttggcgcgtaaaagtggccgggactttgcaggcagcggcggccgggggcggagcgggaccgcgcccccgccgaggcctgccgccgctagc

SEQ ID NO: 683 - DNA, 279 bp, Artificial Sequence
  Synthesized WT E2F1 promoter (A262T point mutation; TCG reduced) with flanking Ase1 (5) and Nhe1 (3) restriction sites
attaatgcctgcgcgcgccccgccccgccattggccgtaccgccccgcgccgccgccccatcacgccccttgccgccgggtccggcgcgttaaagccaataggaaccgccgccgttgttcccgtcacggccggggcagccaattgtggcggcgcccggcggcccgtggctctttggcgggagataggatttggcgcgtaaaagtggccgggactttgcaggcagcggcggccgggggcggagcgggaccgcgcccccgccgtggcctgccgccgctagc

SEQ ID NO: 684 - DNA, 216 bp, Artificial Sequence
  Synthetic Cell Cycle-Dependent promoter, E2F-like, with flanking AseI (5') and NheI (3') restriction sites (E2F1-Syn216)
attaattgccaattgggtaaacccgccccgtgatgccgccccttggctccaatttggtcccaccgccccacaggaaccgcccctaagtccaatgtctgacacaacattccgccccactgacacaacctccaatgatcacttggcggagataggaatttggcgcgtaaaagtggccgggactttgcaggcagatccattctgggggcggaggctagc

SEQ ID NO: 685 - DNA, 146 bp, Artificial Sequence
  Cycle-Dependent promoter, E2F-like with flanking AseI (5') and NheI (3') restriction sites (E2F1-Syn141)
attaatccgcccctaagtccaatgtctgacacaacattccgccccactgacacaacctccaatgatcacttggcggagataggaatttggcgcgtaaaagtggccgggactttgcaggcagatccattctgggggcggaggctagc

SEQ ID NO: 686 - DNA, 114 bp, Artificial Sequence
  Cycle-Dependent promoter, E2F-like, with flanking AseI (5') and NheI (3') restriction sites (E2F1-Syn109)
attaatccgccccactgacacaacctccaatgatcacttggcggagataggaatttggcgcgtaaaagtggccgggactttgcaggcagatccattctgggggcggaggctagc

SEQ ID NO: 687 - DNA, 68 bp, Artificial Sequence; identical to SEQ ID NO: 541
  Cycle-Dependent promoter, E2F-like, with flanking AseI (5') and NheI (3') restriction sites (E2F1-Syn63)

SEQ ID NO: 688 - DNA, 7203 bp, Artificial Sequence
  pCzGFP-1I-T-dSV
ttcctattaatagtaatcaattacggggtcattagttcatagcccatatatggagttccgcgttacataacttacggtaaatggcccgcctggctgaccgcccaacgacccccgcccattgacgtcaataatgacgtatgttcccatagtaacgccaatagggactttccattgacgtcaatgggtggagtatttacggtaaactgcccacttggcagtacatcaagtgtatcatatgccaagtacgccccctattgacgtcaatgacggtaaatggcccgcctggcattatgcccagtacatgaccttatgggactttcctacttggcagtacatctacgtattagtcatcgctattaccatggtgatgcggttttggcagtacatcaatgggcgtggatagcggtttgactcacggggatttccaagtctccaccccattgacgtcaatgggagtttgttttggcaccaaaatcaacgggactttccaaaatgtcgtaacaactccgccccattgacgcaaatgggcggtaggcgtgtacggtgggaggtctatataagcagagctggtttagtgaaccgtcagatccgctagctagaccatggtgagcaagggagaggaactctttacaggtgtggtcccaattctggtggagctggatggagatgtgaatgggcacaaattttctgtcagtggagagggagagggggatgctacctatggcaaactgactctgaagttcatctgcactactggcaagctgcctgtgccatggccaactctggtgacaaccctcacctatggagtccagtgcttttccagatatcctgaccacatgaaacagcatgactttttcaaatctgcaatgcctgagggctatgtgcaagagagaactatctttttcaaggatgatgggaactataagactagggctgaggtgaaatttgaaggagacaccctggtcaataggattgagctcaaggggattgacttcaaggaggatggcaacattctgggccataagctggagtataattacaattcccacaatgtctacattatggctgacaagcagaagaatggcattaaggtcaacttcaagattagacacaacatagaggatggatctgtgcagctggctgaccattaccagcagaatacacctattggggatgggccagtgctgctccctgacaatcactatctgagcacccaatctgctttgtctaaagatcctaatgaaaagagagatcacatggtgctgctggagtttgtaactgctgcaggaattaccttgggtatggatgaactctataaggatccgcccctctccctcccccccccctaacgttactggccgaagccgcttggaataaggccggtgtgcgtttgtctatatgttattttccaccatattgccgtcttttggcaatgtgagggcccggaaacctggccctgtcttcttgacgagcattcctaggggtctttcccctctcgccaaaggaatgcaaggtctgttgaatgtcgtgaaggaagcagttcctctggaagcttcttgaagacaaacaacgtctgtagcgaccctttgcaggcagcggaaccccccacctggcgacaggtgcctctgcggccaaaagccacgtgtataagatacacctgcaaaggcggcacaaccccagtgccacgttgtgagttggatagttgtggaaagagtcaaatggctctcctcaagcgtattcaacaaggggctgaaggatgcccagaaggtaccccattgtatgggatctgatctggggcctcggtgcacatgctttacatgtgtttagtcgaggttaaaaaaacgtctaggccccccgaaccacggggacgtggttttcctttgaaaaacacgatccacaaccatggacaaagtgctgaatagggaggaaagtctgcaactgatggatctgttgggacttgagaggtctgcatggggtaatatcccacttatgaggaaagcatacctgaagaagtgtaaagagttccatcctgacaaaggtggagatgaagagaagatgaaaaagatgaacacactgtataagaaaatggaagatggtgtaaagtatgctcaccagccagattttggaggtttttgggatgccacagagatacctacttatggtacagatgagtgggaacagtggtggaatgcatttaatgaagagaatttgttttgctctgaggaaatgcctagttctgatgatgaggccacagctgactcccagcacagtactccacccaagaaaaagagaaaagtggaagacccaaaggatttcccctctgaactcttgtccttcttgtctcatgcagtgttctcaaataggaccctggcttgctttgctatctacactactaaggagaaggcagctctcttgtacaagaaaatcatggaaaagtattctgtcacctttatttccaggcacaactcctataatcataatattctctttttcttgacaccccataggcatagggtgagtgcaattaacaactatgctcagaagttgtgtactttctccttcctgatctgtaagggtgtgaataaggagtatctcatgtattcagccctgaccagagacccctttagtgtgattgaagaatccctgcctggtgggctcaaggagcatgatttcaacccagaagaggctgaagaaacaaaacaggtgagctggaagcttgtgactgaatatgcaatggagacaaagtgtgatgatgtcctgctcctcctgggaatgtacctggaatttcagtatagctttgaaatgtgtctgaaatgtatcaaaaaggaacagccttctcattataagtatcatgaaaagcactatgccaatgcagctatatttgcagattctaaaaaccagaaaaccatttgtcagcaagctgttgacacagttctggccaagaaaagagtagactctctccagcttaccagggagcagatgttgacaaataggttcaatgaccttctggacagaatggacataatgtttggctcaactggatctgcagatatagaggagtggatggctggagtggcctggctgcactgtctcctccctaaaatggacagtgtagtctatgacttccttaagtgtatggtctataatatccctaaaaagagatactggttgttcaagggacccattgattcagggaaaactacccttgctgctgcacttctggaactctgtggtgggaaagctctcaatgtcaacctgccacttgatagactcaactttgagctgggggtggcaattgatcagtttttggtagtgtttgaagatgtgaaaggtacaggaggagagtccagggatttgcctagtggccaaggcatcaacaatctggacaacctcagagactacctggatgggtctgtaaaggtcaaccttgaaaaaaagcatctcaacaagaggactcaaatatttccacctggaatagtcactatgaatgaatattcagtgcccaagaccctccaggctagatttgtcaagcaaattgatttcagacctaaagattatctgaaacattgtttggagaggagtgagttcctccttgagaaaaggattattcagtcaggaatagcactgcttcttatgctgatatggtatagaccagtggctgagtttgcccaaagcattcagagtagaatagttgagtggaaagaaaggcttgacaaggagttttctctttcagtatatcaaaagatgaagttcaatgtggctatgggtattggagtgcttgattggttgagaaacagtgatgatgatgatgaagattctcaggaaaatgctgataaaaatgaggatgggggagagaagaatatggaagattctggtcatgaaactggcattgatagtcagagccaggggagtttccaggctccacagagctcccaaagtgtccatgaccacaaccagccttaccatatatgcagaggttttacttgtttcaagaaacctcccactccccctccagaacctgaaacatgagcggccgcgactctagatcataatcagccataccacacctccccctgaacctgaaaaatcaatgcaattattgttgaaataaagcacccagcaatgcctgggaccatgtaaaactgtcctggttctttccaaggtatagagcatagcccacaggctgatatttctggccagggttggttggaggacagccttgtctataggaagagaatgaggtttttgcactataagggcatgcaagtcagtcccgcccctaactccacctggttaggaggggaggaggattaattaaattgacatatctacctaatttgtgtataataaccctgataaatgcttcaataatattgaaaaaggaagagtcctgtataaaaagaaccagctgtggaatgtgtgtcagttagtaggcttatgcaaagtagcccgcccaagagacaggctgaggcccgcccaccatgatagaacaagatggacttcatgctggatctcctgcagcatgggtggaaagactttttggttatgattgggctcagcagaccattggatgttctgatgctgctgtgttcaggcttagtgcacagggtaggccagtgctctttgtgaagactgatctctctggagctttgaatgaactgcaggatgaggctgctaggctttcatggctggccaccacaggtgtcccttgtgctgcagtgttggatgtggttactgaggctgggagggattggctcctcctgggagaagtgccaggtcaggatctgttgagttctcacctggctccagctgaaaaagtctccataatggcagatgctatgagaaggctgcacacattggacccagctacatgcccatttgaccatcaggccaaacacaggattgagagggccagaacaagaatggaggctgggttggtggaccaggatgaccttgatgaggagcatcagggcctggctccagctgaattgtttgccaggctcaaggctagtatgcctgatggggaggatctggtggtaactcatggtgatgcctgtttgcctaacatcatggtggaaaatggaaggttctctggattcattgattgtggaagactgggtgtagctgacaggtatcaggacatagctcttgcaacaagggatattgcagaggagttgggtggagaatgggctgacaggttcctggtcttgtatggcattgctgccccagacagccaaagaattgctttctataggctgttggatgagtttttctaagctcagcacccacaaagctctcaggtcctaagagacactggcacccatatccatgcatcccttgtataaataaagcatccagcaaagctggtaccatgtaaaactgtcttggttgtttccaaggtatagagcatagctcaataggtttttgactttgtcccgcccctctaagtcctgcacacagatactccaatatgacatacagcatgcttgggaactgagtgcccccatgtgggcagagagcaccatgtgccacagtccctgagaagttcttgggaagggtgggcaattgccatgtgtgcctagagaaggttgtttgtaatactgccaagtgccatgtggtgtgatattggctccatgtgccttgtttgtaataacatttccatgtgtcttgggaagaaccatatataagcagagctggtttagtgaaccctcagataggcctagaccatggccagcagtgagaatgtcataacagagttcatgagattcaaggtgaggatggagggaactgtcaatggtcatgagtttgagattgaaggggaaggggagggcagaccctatgagggccacaacacagtcaaattgaaggtgaccaaagggggaccccttccctttgcctgggacatcctgagcccacagtttcagtatggttccaaagtttatgtaaagcaccctgctgacatccctgactacaagaaactgtccttcccagaaggattcaagtgggaaagggtcatgaactttgaggatggaggggttgcaacagtgacccaggacagttctctccaagatggctgtttcatctacaaggtaaaattcattggtgtgaactttccctctgatggcccagtgatgcaaaaaaagaccatgggctgggaagcctcaacagaaaggctgtaccctagagatggagttctcaagggtgagacccacaaagctctaaagctcaaagatgggggccactatctggtggagttcaagagcatctacatggcaaaaaagccagtgcagttgcctggctattactatgtggatgccaagcttgacataacctcacacaatgaagactacactattgtggaacagtatgagaggactgagggaagacatcatctgtttctgtgaattcgcactgcatggacttacctgcctggtggtatcagtcacaggctctgataaggattcagctgttgtataaataaagcatgcagcctagcaggaaccatgttaatctctcttggttgtttccttggaatactcctaagcacattaggtttttagatctgtagaaaagatcaaaggatcttcttgagatcctttttttctgcgcgtaatctgctgcttgcaaacaaaaaaaccaccgctaccagcggtggtttgtttgccggatcaagagctaccaactctttttccgaaggtaactggcttcagcagagcgcagataccaaatactgtccttctagtgtagccgtagttaggccaccacttcaagaactctgtagcaccgcctacatacctcgctctgctaatcctgttaccagtggctgctgccagtggcgataagtcgtgtcttaccgggttggactcaagacgatagttaccggataaggcgcagcggtcgggctgaacggggggttcgtgcacacagcccagcttggagcgaacgacctacaccgaactgagatacctacagcgtgagctatgagaaagcgccacgcttcccgaagggagaaaggcggacaggtatccggtaagcggcagggtcggaacaggagagcgcacgagggagcttccagggggaaacgcctggtatctttatagtcctgtcgggtttcgccacctctgacttgagcgtcgatttttgtgatgctcgtcaggggggcggagcctatggaaaaacgccagcaacgcggcctttttacgg

SEQ ID NO: 689 - DNA, 7343 bp, Artificial Sequence
  pC-T-I-zGFP-BB3
ttcctattaatagtaatcaattacggggtcattagttcatagcccatatatggagttccgcgttacataacttacggtaaatggcccgcctggctgaccgcccaacgacccccgcccattgacgtcaataatgacgtatgttcccatagtaacgccaatagggactttccattgacgtcaatgggtggagtatttacggtaaactgcccacttggcagtacatcaagtgtatcatatgccaagtacgccccctattgacgtcaatgacggtaaatggcccgcctggcattatgcccagtacatgaccttatgggactttcctacttggcagtacatctacgtattagtcatcgctattaccatggtgatgcggttttggcagtacatcaatgggcgtggatagcggtttgactcacggggatttccaagtctccaccccattgacgtcaatgggagtttgttttggcaccaaaatcaacgggactttccaaaatgtcgtaacaactccgccccattgacgcaaatgggcggtaggcgtgtacggtgggaggtctatataagcagagctggtttagtgaaccgtcagatccgctagcacaaccatggacaaagtgctgaatagggaggaaagtctgcaactgatggatctgttgggacttgagaggtctgcatggggtaatatcccacttatgaggaaagcatacctgaagaagtgtaaagagttccatcctgacaaaggtggagatgaagagaagatgaaaaagatgaacacactgtataagaaaatggaagatggtgtaaagtatgctcaccagccagattttggaggtttttgggatgccacagagatacctacttatggtacagatgagtgggaacagtggtggaatgcatttaatgaagagaatttgttttgctctgaggaaatgcctagttctgatgatgaggccacagctgactcccagcacagtactccacccaagaaaaagagaaaagtggaagacccaaaggatttcccctctgaactcttgtccttcttgtctcatgcagtgttctcaaataggaccctggcttgctttgctatctacactactaaggagaaggcagctctcttgtacaagaaaatcatggaaaagtattctgtcacctttatttccaggcacaactcctataatcataatattctctttttcttgacaccccataggcatagggtgagtgcaattaacaactatgctcagaagttgtgtactttctccttcctgatctgtaagggtgtgaataaggagtatctcatgtattcagccctgaccagagacccctttagtgtgattgaagaatccctgcctggtgggctcaaggagcatgatttcaacccagaagaggctgaagaaacaaaacaggtgagctggaagcttgtgactgaatatgcaatggagacaaagtgtgatgatgtcctgctcctcctgggaatgtacctggaatttcagtatagctttgaaatgtgtctgaaatgtatcaaaaaggaacagccttctcattataagtatcatgaaaagcactatgccaatgcagctatatttgcagattctaaaaaccagaaaaccatttgtcagcaagctgttgacacagttctggccaagaaaagagtagactctctccagcttaccagggagcagatgttgacaaataggttcaatgaccttctggacagaatggacataatgtttggctcaactggatctgcagatatagaggagtggatggctggagtggcctggctgcactgtctcctccctaaaatggacagtgtagtctatgacttccttaagtgtatggtctataatatccctaaaaagagatactggttgttcaagggacccattgattcagggaaaactacccttgctgctgcacttctggaactctgtggtgggaaagctctcaatgtcaacctgccacttgatagactcaactttgagctgggggtggcaattgatcagtttttggtagtgtttgaagatgtgaaaggtacaggaggagagtccagggatttgcctagtggccaaggcatcaacaatctggacaacctcagagactacctggatgggtctgtaaaggtcaaccttgaaaaaaagcatctcaacaagaggactcaaatatttccacctggaatagtcactatgaatgaatattcagtgcccaagaccctccaggctagatttgtcaagcaaattgatttcagacctaaagattatctgaaacattgtttggagaggagtgagttcctccttgagaaaaggattattcagtcaggaatagcactgcttcttatgctgatatggtatagaccagtggctgagtttgcccaaagcattcagagtagaatagttgagtggaaagaaaggcttgacaaggagttttctctttcagtatatcaaaagatgaagttcaatgtggctatgggtattggagtgcttgattggttgagaaacagtgatgatgatgatgaagattctcaggaaaatgctgataaaaatgaggatgggggagagaagaatatggaagattctggtcatgaaactggcattgatagtcagagccaggggagtttccaggctccacagagctcccaaagtgtccatgaccacaaccagccttaccatatatgcagaggttttacttgtttcaagaaacctcccactccccctccagaacctgaaacatgaggatccgcccctctccctcccccccccctaacgttactggccgaagccgcttggaataaggccggtgtgcgtttgtctatatgttattttccaccatattgccgtcttttggcaatgtgagggcccggaaacctggccctgtcttcttgacgagcattcctaggggtctttcccctctcgccaaaggaatgcaaggtctgttgaatgtcgtgaaggaagcagttcctctggaagcttcttgaagacaaacaacgtctgtagcgaccctttgcaggcagcggaaccccccacctggcgacaggtgcctctgcggccaaaagccacgtgtataagatacacctgcaaaggcggcacaaccccagtgccacgttgtgagttggatagttgtggaaagagtcaaatggctctcctcaagcgtattcaacaaggggctgaaggatgcccagaaggtaccccattgtatgggatctgatctggggcctcggtgcacatgctttacatgtgtttagtcgaggttaaaaaaacgtctaggccccccgaaccacggggacgtggttttcctttgaaaaacacgatgataatatggccacaaccatggtgagcaagggagaggaactctttacaggtgtggtcccaattctggtggagctggatggagatgtgaatgggcacaaattttctgtcagtggagagggagagggggatgctacctatggcaaactgactctgaagttcatctgcactactggcaagctgcctgtgccatggccaactctggtgacaaccctcacctatggagtccagtgcttttccagatatcctgaccacatgaaacagcatgactttttcaaatctgcaatgcctgagggctatgtgcaagagagaactatctttttcaaggatgatgggaactataagactagggctgaggtgaaatttgaaggagacaccctggtcaataggattgagctcaaggggattgacttcaaggaggatggcaacattctgggccataagctggagtataattacaattcccacaatgtctacattatggctgacaagcagaagaatggcattaaggtcaacttcaagattagacacaacatagaggatggatctgtgcagctggctgaccattaccagcagaatacacctattggggatgggccagtgctgctccctgacaatcactatctgagcacccaatctgctttgtctaaagatcctaatgaaaagagagatcacatggtgctgctggagtttgtaactgctgcaggaattaccttgggtatggatgaactctataagtaagcggccgcgactctagatcataatcagccataccacacctccccctgaacctgaaaaatcaatgcaattattgttgaaataaagcacccagcaatgcctgggaccatgtaaaactgtcctggttctttccaaggtatagagcatagcccacaggctgatatttctggccagggttggttggaggacagccttgtctataggaagagaatgaggtttttgcactataagggcatgcaagtcagtcccgcccctaactccacctggttgcccatcccgcccctaactccgcccagttccgcccattctccgccccatggctgactaattttttttatttatgcagaggcggaggccgcctcggcctctgagctattccagaagtagtgaggaggcttttttggaggcccttaattaaattgacatatctacctaatttgtgtataataaccctgataaatgcttcaataatattgaaaaaggaagagtcctgtataaaaagaaccagctgtggaatgtgtgtcagttagtaggcttatgcaaagtagcccgcccaagagacaggctgaggcccgcccaccatgatagaacaagatggacttcatgctggatctcctgcagcatgggtggaaagactttttggttatgattgggctcagcagaccattggatgttctgatgctgctgtgttcaggcttagtgcacagggtaggccagtgctctttgtgaagactgatctctctggagctttgaatgaactgcaggatgaggctgctaggctttcatggctggccaccacaggtgtcccttgtgctgcagtgttggatgtggttactgaggctgggagggattggctcctcctgggagaagtgccaggtcaggatctgttgagttctcacctggctccagctgaaaaagtctccataatggcagatgctatgagaaggctgcacacattggacccagctacatgcccatttgaccatcaggccaaacacaggattgagagggccagaacaagaatggaggctgggttggtggaccaggatgaccttgatgaggagcatcagggcctggctccagctgaattgtttgccaggctcaaggctagtatgcctgatggggaggatctggtggtaactcatggtgatgcctgtttgcctaacatcatggtggaaaatggaaggttctctggattcattgattgtggaagactgggtgtagctgacaggtatcaggacatagctcttgcaacaagggatattgcagaggagttgggtggagaatgggctgacaggttcctggtcttgtatggcattgctgccccagacagccaaagaattgctttctataggctgttggatgagtttttctaagctcagcacccacaaagctctcaggtcctaagagacactggcacccatatccatgcatcccttgtataaataaagcatccagcaaagctggtaccatgtaaaactgtcttggttgtttccaaggtatagagcatagctcaataggtttttgactttgtcccgcccctctaagtcctgcacacagatactccaatatgacatacagcatgcttgggaactgagtgcccccatgtgggcagagagcaccatgtgccacagtccctgagaagttcttgggaagggtgggcaattgccatgtgtgcctagagaaggttgtttgtaatactgccaagtgccatgtggtgtgatattggctccatgtgccttgtttgtaataacatttccatgtgtcttgggaagaaccatatataagcagagctggtttagtgaaccctcagataggcctagaccatggccagcagtgagaatgtcataacagagttcatgagattcaaggtgaggatggagggaactgtcaatggtcatgagtttgagattgaaggggaaggggagggcagaccctatgagggccacaacacagtcaaattgaaggtgaccaaagggggaccccttccctttgcctgggacatcctgagcccacagtttcagtatggttccaaagtttatgtaaagcaccctgctgacatccctgactacaagaaactgtccttcccagaaggattcaagtgggaaagggtcatgaactttgaggatggaggggttgcaacagtgacccaggacagttctctccaagatggctgtttcatctacaaggtaaaattcattggtgtgaactttccctctgatggcccagtgatgcaaaaaaagaccatgggctgggaagcctcaacagaaaggctgtaccctagagatggagttctcaagggtgagacccacaaagctctaaagctcaaagatgggggccactatctggtggagttcaagagcatctacatggcaaaaaagccagtgcagttgcctggctattactatgtggatgccaagcttgacataacctcacacaatgaagactacactattgtggaacagtatgagaggactgagggaagacatcatctgtttctgtgaattcgcactgcatggacttacctgcctggtggtatcagtcacaggctctgataaggattcagctgttgtataaataaagcatgcagcctagcaggaaccatgttaatctctcttggttgtttccttggaatactcctaagcacattaggtttttagatctgtagaaaagatcaaaggatcttcttgagatcctttttttctgcgcgtaatctgctgcttgcaaacaaaaaaaccaccgctaccagcggtggtttgtttgccggatcaagagctaccaactctttttccgaaggtaactggcttcagcagagcgcagataccaaatactgtccttctagtgtagccgtagttaggccaccacttcaagaactctgtagcaccgcctacatacctcgctctgctaatcctgttaccagtggctgctgccagtggcgataagtcgtgtcttaccgggttggactcaagacgatagttaccggataaggcgcagcggtcgggctgaacggggggttcgtgcacacagcccagcttggagcgaacgacctacaccgaactgagatacctacagcgtgagctatgagaaagcgccacgcttcccgaagggagaaaggcggacaggtatccggtaagcggcagggtcggaacaggagagcgcacgagggagcttccagggggaaacgcctggtatctttatagtcctgtcgggtttcgccacctctgacttgagcgtcgatttttgtgatgctcgtcaggggggcggagcctatggaaaaacgccagcaacgcggcctttttacgg

SEQ ID NO: 690 - DNA, 7216 bp, Artificial Sequence
  pC-T-I-zGFP-dSV
ttcctattaatagtaatcaattacggggtcattagttcatagcccatatatggagttccgcgttacataacttacggtaaatggcccgcctggctgaccgcccaacgacccccgcccattgacgtcaataatgacgtatgttcccatagtaacgccaatagggactttccattgacgtcaatgggtggagtatttacggtaaactgcccacttggcagtacatcaagtgtatcatatgccaagtacgccccctattgacgtcaatgacggtaaatggcccgcctggcattatgcccagtacatgaccttatgggactttcctacttggcagtacatctacgtattagtcatcgctattaccatggtgatgcggttttggcagtacatcaatgggcgtggatagcggtttgactcacggggatttccaagtctccaccccattgacgtcaatgggagtttgttttggcaccaaaatcaacgggactttccaaaatgtcgtaacaactccgccccattgacgcaaatgggcggtaggcgtgtacggtgggaggtctatataagcagagctggtttagtgaaccgtcagatccgctagcacaaccatggacaaagtgctgaatagggaggaaagtctgcaactgatggatctgttgggacttgagaggtctgcatggggtaatatcccacttatgaggaaagcatacctgaagaagtgtaaagagttccatcctgacaaaggtggagatgaagagaagatgaaaaagatgaacacactgtataagaaaatggaagatggtgtaaagtatgctcaccagccagattttggaggtttttgggatgccacagagatacctacttatggtacagatgagtgggaacagtggtggaatgcatttaatgaagagaatttgttttgctctgaggaaatgcctagttctgatgatgaggccacagctgactcccagcacagtactccacccaagaaaaagagaaaagtggaagacccaaaggatttcccctctgaactcttgtccttcttgtctcatgcagtgttctcaaataggaccctggcttgctttgctatctacactactaaggagaaggcagctctcttgtacaagaaaatcatggaaaagtattctgtcacctttatttccaggcacaactcctataatcataatattctctttttcttgacaccccataggcatagggtgagtgcaattaacaactatgctcagaagttgtgtactttctccttcctgatctgtaagggtgtgaataaggagtatctcatgtattcagccctgaccagagacccctttagtgtgattgaagaatccctgcctggtgggctcaaggagcatgatttcaacccagaagaggctgaagaaacaaaacaggtgagctggaagcttgtgactgaatatgcaatggagacaaagtgtgatgatgtcctgctcctcctgggaatgtacctggaatttcagtatagctttgaaatgtgtctgaaatgtatcaaaaaggaacagccttctcattataagtatcatgaaaagcactatgccaatgcagctatatttgcagattctaaaaaccagaaaaccatttgtcagcaagctgttgacacagttctggccaagaaaagagtagactctctccagcttaccagggagcagatgttgacaaataggttcaatgaccttctggacagaatggacataatgtttggctcaactggatctgcagatatagaggagtggatggctggagtggcctggctgcactgtctcctccctaaaatggacagtgtagtctatgacttccttaagtgtatggtctataatatccctaaaaagagatactggttgttcaagggacccattgattcagggaaaactacccttgctgctgcacttctggaactctgtggtgggaaagctctcaatgtcaacctgccacttgatagactcaactttgagctgggggtggcaattgatcagtttttggtagtgtttgaagatgtgaaaggtacaggaggagagtccagggatttgcctagtggccaaggcatcaacaatctggacaacctcagagactacctggatgggtctgtaaaggtcaaccttgaaaaaaagcatctcaacaagaggactcaaatatttccacctggaatagtcactatgaatgaatattcagtgcccaagaccctccaggctagatttgtcaagcaaattgatttcagacctaaagattatctgaaacattgtttggagaggagtgagttcctccttgagaaaaggattattcagtcaggaatagcactgcttcttatgctgatatggtatagaccagtggctgagtttgcccaaagcattcagagtagaatagttgagtggaaagaaaggcttgacaaggagttttctctttcagtatatcaaaagatgaagttcaatgtggctatgggtattggagtgcttgattggttgagaaacagtgatgatgatgatgaagattctcaggaaaatgctgataaaaatgaggatgggggagagaagaatatggaagattctggtcatgaaactggcattgatagtcagagccaggggagtttccaggctccacagagctcccaaagtgtccatgaccacaaccagccttaccatatatgcagaggttttacttgtttcaagaaacctcccactccccctccagaacctgaaacatgaggatccgcccctctccctcccccccccctaacgttactggccgaagccgcttggaataaggccggtgtgcgtttgtctatatgttattttccaccatattgccgtcttttggcaatgtgagggcccggaaacctggccctgtcttcttgacgagcattcctaggggtctttcccctctcgccaaaggaatgcaaggtctgttgaatgtcgtgaaggaagcagttcctctggaagcttcttgaagacaaacaacgtctgtagcgaccctttgcaggcagcggaaccccccacctggcgacaggtgcctctgcggccaaaagccacgtgtataagatacacctgcaaaggcggcacaaccccagtgccacgttgtgagttggatagttgtggaaagagtcaaatggctctcctcaagcgtattcaacaaggggctgaaggatgcccagaaggtaccccattgtatgggatctgatctggggcctcggtgcacatgctttacatgtgtttagtcgaggttaaaaaaacgtctaggccccccgaaccacggggacgtggttttcctttgaaaaacacgatgataatatggccacaaccatggtgagcaagggagaggaactctttacaggtgtggtcccaattctggtggagctggatggagatgtgaatgggcacaaattttctgtcagtggagagggagagggggatgctacctatggcaaactgactctgaagttcatctgcactactggcaagctgcctgtgccatggccaactctggtgacaaccctcacctatggagtccagtgcttttccagatatcctgaccacatgaaacagcatgactttttcaaatctgcaatgcctgagggctatgtgcaagagagaactatctttttcaaggatgatgggaactataagactagggctgaggtgaaatttgaaggagacaccctggtcaataggattgagctcaaggggattgacttcaaggaggatggcaacattctgggccataagctggagtataattacaattcccacaatgtctacattatggctgacaagcagaagaatggcattaaggtcaacttcaagattagacacaacatagaggatggatctgtgcagctggctgaccattaccagcagaatacacctattggggatgggccagtgctgctccctgacaatcactatctgagcacccaatctgctttgtctaaagatcctaatgaaaagagagatcacatggtgctgctggagtttgtaactgctgcaggaattaccttgggtatggatgaactctataagtaagcggccgcgactctagatcataatcagccataccacacctccccctgaacctgaaaaatcaatgcaattattgttgaaataaagcacccagcaatgcctgggaccatgtaaaactgtcctggttctttccaaggtatagagcatagcccacaggctgatatttctggccagggttggttggaggacagccttgtctataggaagagaatgaggtttttgcactataagggcatgcaagtcagtcccgcccctaactccacctggttaggaggggaggaggattaataaattgacatatctacctaatttgtgtataataaccctgataaatgcttcaataatattgaaaaaggaagagtcctgtataaaaagaaccagctgtggaatgtgtgtcagttagtaggcttatgcaaagtagcccgcccaagagacaggctgaggcccgcccaccatgatagaacaagatggacttcatgctggatctcctgcagcatgggtggaaagactttttggttatgattgggctcagcagaccattggatgttctgatgctgctgtgttcaggcttagtgcacagggtaggccagtgctctttgtgaagactgatctctctggagctttgaatgaactgcaggatgaggctgctaggctttcatggctggccaccacaggtgtcccttgtgctgcagtgttggatgtggttactgaggctgggagggattggctcctcctgggagaagtgccaggtcaggatctgttgagttctcacctggctccagctgaaaaagtctccataatggcagatgctatgagaaggctgcacacattggacccagctacatgcccatttgaccatcaggccaaacacaggattgagagggccagaacaagaatggaggctgggttggtggaccaggatgaccttgatgaggagcatcagggcctggctccagctgaattgtttgccaggctcaaggctagtatgcctgatggggaggatctggtggtaactcatggtgatgcctgtttgcctaacatcatggtggaaaatggaaggttctctggattcattgattgtggaagactgggtgtagctgacaggtatcaggacatagctcttgcaacaagggatattgcagaggagttgggtggagaatgggctgacaggttcctggtcttgtatggcattgctgccccagacagccaaagaattgctttctataggctgttggatgagtttttctaagctcagcacccacaaagctctcaggtcctaagagacactggcacccatatccatgcatcccttgtataaataaagcatccagcaaagctggtaccatgtaaaactgtcttggttgtttccaaggtatagagcatagctcaataggtttttgactttgtcccgcccctctaagtcctgcacacagatactccaatatgacatacagcatgcttgggaactgagtgcccccatgtgggcagagagcaccatgtgccacagtccctgagaagttcttgggaagggtgggcaattgccatgtgtgcctagagaaggttgtttgtaatactgccaagtgccatgtggtgtgatattggctccatgtgccttgtttgtaataacatttccatgtgtcttgggaagaaccatatataagcagagctggtttagtgaaccctcagataggcctagaccatggccagcagtgagaatgtcataacagagttcatgagattcaaggtgaggatggagggaactgtcaatggtcatgagtttgagattgaaggggaaggggagggcagaccctatgagggccacaacacagtcaaattgaaggtgaccaaagggggaccccttccctttgcctgggacatcctgagcccacagtttcagtatggttccaaagtttatgtaaagcaccctgctgacatccctgactacaagaaactgtccttcccagaaggattcaagtgggaaagggtcatgaactttgaggatggaggggttgcaacagtgacccaggacagttctctccaagatggctgtttcatctacaaggtaaaattcattggtgtgaactttccctctgatggcccagtgatgcaaaaaaagaccatgggctgggaagcctcaacagaaaggctgtaccctagagatggagttctcaagggtgagacccacaaagctctaaagctcaaagatgggggccactatctggtggagttcaagagcatctacatggcaaaaaagccagtgcagttgcctggctattactatgtggatgccaagcttgacataacctcacacaatgaagactacactattgtggaacagtatgagaggactgagggaagacatcatctgtttctgtgaattcgcactgcatggacttacctgcctggtggtatcagtcacaggctctgataaggattcagctgttgtataaataaagcatgcagcctagcaggaaccatgttaatctctcttggttgtttccttggaatactcctaagcacattaggtttttagatctgtagaaaagatcaaaggatcttcttgagatcctttttttctgcgcgtaatctgctgcttgcaaacaaaaaaaccaccgctaccagcggtggtttgtttgccggatcaagagctaccaactctttttccgaaggtaactggcttcagcagagcgcagataccaaatactgtccttctagtgtagccgtagttaggccaccacttcaagaactctgtagcaccgcctacatacctcgctctgctaatcctgttaccagtggctgctgccagtggcgataagtcgtgtcttaccgggttggactcaagacgatagttaccggataaggcgcagcggtcgggctgaacggggggttcgtgcacacagcccagcttggagcgaacgacctacaccgaactgagatacctacagcgtgagctatgagaaagcgccacgcttcccgaagggagaaaggcggacaggtatccggtaagcggcagggtcggaacaggagagcgcacgagggagcttccagggggaaacgcctggtatctttatagtcctgtcgggtttcgccacctctgacttgagcgtcgatttttgtgatgctcgtcaggggggcggagcctatggaaaaacgccagcaacgcggcctttttacgg

SEQ ID NO: 691 - DNA, 8279 bp, Artificial Sequence
  pC-T-I-Luc-BB3
ttcctattaatagtaatcaattacggggtcattagttcatagcccatatatggagttccgcgttacataacttacggtaaatggcccgcctggctgaccgcccaacgacccccgcccattgacgtcaataatgacgtatgttcccatagtaacgccaatagggactttccattgacgtcaatgggtggagtatttacggtaaactgcccacttggcagtacatcaagtgtatcatatgccaagtacgccccctattgacgtcaatgacggtaaatggcccgcctggcattatgcccagtacatgaccttatgggactttcctacttggcagtacatctacgtattagtcatcgctattaccatggtgatgcggttttggcagtacatcaatgggcgtggatagcggtttgactcacggggatttccaagtctccaccccattgacgtcaatgggagtttgttttggcaccaaaatcaacgggactttccaaaatgtcgtaacaactccgccccattgacgcaaatgggcggtaggcgtgtacggtgggaggtctatataagcagagctggtttagtgaaccgtcagatccgctagcacaaccatggacaaagtgctgaatagggaggaaagtctgcaactgatggatctgttgggacttgagaggtctgcatggggtaatatcccacttatgaggaaagcatacctgaagaagtgtaaagagttccatcctgacaaaggtggagatgaagagaagatgaaaaagatgaacacactgtataagaaaatggaagatggtgtaaagtatgctcaccagccagattttggaggtttttgggatgccacagagatacctacttatggtacagatgagtgggaacagtggtggaatgcatttaatgaagagaatttgttttgctctgaggaaatgcctagttctgatgatgaggccacagctgactcccagcacagtactccacccaagaaaaagagaaaagtggaagacccaaaggatttcccctctgaactcttgtccttcttgtctcatgcagtgttctcaaataggaccctggcttgctttgctatctacactactaaggagaaggcagctctcttgtacaagaaaatcatggaaaagtattctgtcacctttatttccaggcacaactcctataatcataatattctctttttcttgacaccccataggcatagggtgagtgcaattaacaactatgctcagaagttgtgtactttctccttcctgatctgtaagggtgtgaataaggagtatctcatgtattcagccctgaccagagacccctttagtgtgattgaagaatccctgcctggtgggctcaaggagcatgatttcaacccagaagaggctgaagaaacaaaacaggtgagctggaagcttgtgactgaatatgcaatggagacaaagtgtgatgatgtcctgctcctcctgggaatgtacctggaatttcagtatagctttgaaatgtgtctgaaatgtatcaaaaaggaacagccttctcattataagtatcatgaaaagcactatgccaatgcagctatatttgcagattctaaaaaccagaaaaccatttgtcagcaagctgttgacacagttctggccaagaaaagagtagactctctccagcttaccagggagcagatgttgacaaataggttcaatgaccttctggacagaatggacataatgtttggctcaactggatctgcagatatagaggagtggatggctggagtggcctggctgcactgtctcctccctaaaatggacagtgtagtctatgacttccttaagtgtatggtctataatatccctaaaaagagatactggttgttcaagggacccattgattcagggaaaactacccttgctgctgcacttctggaactctgtggtgggaaagctctcaatgtcaacctgccacttgatagactcaactttgagctgggggtggcaattgatcagtttttggtagtgtttgaagatgtgaaaggtacaggaggagagtccagggatttgcctagtggccaaggcatcaacaatctggacaacctcagagactacctggatgggtctgtaaaggtcaaccttgaaaaaaagcatctcaacaagaggactcaaatatttccacctggaatagtcactatgaatgaatattcagtgcccaagaccctccaggctagatttgtcaagcaaattgatttcagacctaaagattatctgaaacattgtttggagaggagtgagttcctccttgagaaaaggattattcagtcaggaatagcactgcttcttatgctgatatggtatagaccagtggctgagtttgcccaaagcattcagagtagaatagttgagtggaaagaaaggcttgacaaggagttttctctttcagtatatcaaaagatgaagttcaatgtggctatgggtattggagtgcttgattggttgagaaacagtgatgatgatgatgaagattctcaggaaaatgctgataaaaatgaggatgggggagagaagaatatggaagattctggtcatgaaactggcattgatagtcagagccaggggagtttccaggctccacagagctcccaaagtgtccatgaccacaaccagccttaccatatatgcagaggttttacttgtttcaagaaacctcccactccccctccagaacctgaaacatgaggatccgcccctctccctcccccccccctaacgttactggccgaagccgcttggaataaggccggtgtgcgtttgtctatatgttattttccaccatattgccgtcttttggcaatgtgagggcccggaaacctggccctgtcttcttgacgagcattcctaggggtctttcccctctcgccaaaggaatgcaaggtctgttgaatgtcgtgaaggaagcagttcctctggaagcttcttgaagacaaacaacgtctgtagcgaccctttgcaggcagcggaaccccccacctggcgacaggtgcctctgcggccaaaagccacgtgtataagatacacctgcaaaggcggcacaaccccagtgccacgttgtgagttggatagttgtggaaagagtcaaatggctctcctcaagcgtattcaacaaggggctgaaggatgcccagaaggtaccccattgtatgggatctgatctggggcctcggtgcacatgctttacatgtgtttagtcgaggttaaaaaaacgtctaggccccccgaaccacggggacgtggttttcctttgaaaaacacgatgataatatggccacaaccatggaagacgccaaaaacataaagaaaggcccggcgccattctatcctctagaggatggaaccgctggagagcaactgcataaggctatgaagagatacgccctggttcctggaacaattgcttttacagatgcacatatcgaggtgaacatcacgtacgcggaatacttcgaaatgtccgttcggttggcagaagctatgaaacgatatgggctgaatacaaatcacagaatcgtcgtatgcagtgaaaactctcttcaattctttatgccggtgttgggcgcgttatttatcggagttgcagttgcgcccgcgaacgacatttataatgaacgtgaattgctcaacagtatgaacatttcgcagcctaccgtagtgtttgtttccaaaaaggggttgcaaaaaattttgaacgtgcaaaaaaaattaccaataatccagaaaattattatcatggattctaaaacggattaccagggatttcagtcgatgtacacgttcgtcacatctcatctacctcccggttttaatgaatacgattttgtaccagagtcctttgatcgtgacaaaacaattgcactgataatgaattcctctggatctactgggttacctaagggtgtggcccttccgcatagaactgcctgcgtcagattctcgcatgccagagatcctatttttggcaatcaaatcattccggatactgcgattttaagtgttgttccattccatcacggttttggaatgtttactacactcggatatttgatatgtggatttcgagtcgtcttaatgtatagatttgaagaagagctgtttttacgatcccttcaggattacaaaattcaaagtgcgttgctagtaccaaccctattttcattcttcgccaaaagcactctgattgacaaatacgatttatctaatttacacgaaattgcttctgggggcgcacctctttcgaaagaagtcggggaagcggttgcaaaacgcttccatcttccagggatacgacaaggatatgggctcactgagactacatcagctattctgattacacccgagggggatgataaaccgggcgcggtcggtaaagttgttccattttttgaagcgaaggttgtggatctggataccgggaaaacgctgggcgttaatcagagaggcgaattatgtgtcagaggacctatgattatgtccggttatgtaaacaatccggaagcgaccaacgccttgattgacaaggatggatggctacattctggagacatagcttactgggacgaagacgaacacttcttcatagttgaccgcttgaagtctttaattaaatacaaaggatatcaggtggcccccgctgaattggaatcgatattgttacaacaccccaacatcttcgacgcgggcgtggcaggtcttcccgacgatgacgccggtgaacttcccgccgccgttgttgttttggagcacggaaagacgatgacggaaaaagagatcgtggattacgtcgccagtcaagtaacaaccgcgaaaaagttgcgcggaggagttgtgtttgtggacgaagtaccgaaaggtcttaccggaaaactcgacgcaagaaaaatcagagagatcctcataaaggccaagaagggcggaaagtccaaattgtaatgagcggccgcgactctagatcataatcagccataccacacctccccctgaacctgaaaaatcaatgcaattattgttgaaataaagcacccagcaatgcctgggaccatgtaaaactgtcctggttctttccaaggtatagagcatagcccacaggctgatatttctggccagggttggttggaggacagccttgtctataggaagagaatgaggtttttgcactataagggcatgcaagtcagtcccgcccctaactccacctggttgcccatcccgcccctaactccgcccagttccgcccattctccgccccatggctgactaattttttttatttatgcagaggcggaggccgcctcggcctctgagctattccagaagtagtgaggaggcttttttggaggcccttaattaaattgacatatctacctaatttgtgtataataaccctgataaatgcttcaataatattgaaaaaggaagagtcctgtataaaaagaaccagctgtggaatgtgtgtcagttagtaggcttatgcaaagtagcccgcccaagagacaggctgaggcccgcccaccatgatagaacaagatggacttcatgctggatctcctgcagcatgggtggaaagactttttggttatgattgggctcagcagaccattggatgttctgatgctgctgtgttcaggcttagtgcacagggtaggccagtgctctttgtgaagactgatctctctggagctttgaatgaactgcaggatgaggctgctaggctttcatggctggccaccacaggtgtcccttgtgctgcagtgttggatgtggttactgaggctgggagggattggctcctcctgggagaagtgccaggtcaggatctgttgagttctcacctggctccagctgaaaaagtctccataatggcagatgctatgagaaggctgcacacattggacccagctacatgcccatttgaccatcaggccaaacacaggattgagagggccagaacaagaatggaggctgggttggtggaccaggatgaccttgatgaggagcatcagggcctggctccagctgaattgtttgccaggctcaaggctagtatgcctgatggggaggatctggtggtaactcatggtgatgcctgtttgcctaacatcatggtggaaaatggaaggttctctggattcattgattgtggaagactgggtgtagctgacaggtatcaggacatagctcttgcaacaagggatattgcagaggagttgggtggagaatgggctgacaggttcctggtcttgtatggcattgctgccccagacagccaaagaattgctttctataggctgttggatgagtttttctaagctcagcacccacaaagctctcaggtcctaagagacactggcacccatatccatgcatcccttgtataaataaagcatccagcaaagctggtaccatgtaaaactgtcttggttgtttccaaggtatagagcatagctcaataggtttttgactttgtcccgcccctctaagtcctgcacacagatactccaatatgacatacagcatgcttgggaactgagtgcccccatgtgggcagagagcaccatgtgccacagtccctgagaagttcttgggaagggtgggcaattgccatgtgtgcctagagaaggttgtttgtaatactgccaagtgccatgtggtgtgatattggctccatgtgccttgtttgtaataacatttccatgtgtcttgggaagaaccatatataagcagagctggtttagtgaaccctcagataggcctagaccatggccagcagtgagaatgtcataacagagttcatgagattcaaggtgaggatggagggaactgtcaatggtcatgagtttgagattgaaggggaaggggagggcagaccctatgagggccacaacacagtcaaattgaaggtgaccaaagggggaccccttccctttgcctgggacatcctgagcccacagtttcagtatggttccaaagtttatgtaaagcaccctgctgacatccctgactacaagaaactgtccttcccagaaggattcaagtgggaaagggtcatgaactttgaggatggaggggttgcaacagtgacccaggacagttctctccaagatggctgtttcatctacaaggtaaaattcattggtgtgaactttccctctgatggcccagtgatgcaaaaaaagaccatgggctgggaagcctcaacagaaaggctgtaccctagagatggagttctcaagggtgagacccacaaagctctaaagctcaaagatgggggccactatctggtggagttcaagagcatctacatggcaaaaaagccagtgcagttgcctggctattactatgtggatgccaagcttgacataacctcacacaatgaagactacactattgtggaacagtatgagaggactgagggaagacatcatctgtttctgtgaattcgcactgcatggacttacctgcctggtggtatcagtcacaggctctgataaggattcagctgttgtataaataaagcatgcagcctagcaggaaccatgttaatctctcttggttgtttccttggaatactcctaagcacattaggtttttagatctgtagaaaagatcaaaggatcttcttgagatcctttttttctgcgcgtaatctgctgcttgcaaacaaaaaaaccaccgctaccagcggtggtttgtttgccggatcaagagctaccaactctttttccgaaggtaactggcttcagcagagcgcagataccaaatactgtccttctagtgtagccgtagttaggccaccacttcaagaactctgtagcaccgcctacatacctcgctctgctaatcctgttaccagtggctgctgccagtggcgataagtcgtgtcttaccgggttggactcaagacgatagttaccggataaggcgcagcggtcgggctgaacggggggttcgtgcacacagcccagcttggagcgaacgacctacaccgaactgagatacctacagcgtgagctatgagaaagcgccacgcttcccgaagggagaaaggcggacaggtatccggtaagcggcagggtcggaacaggagagcgcacgagggagcttccagggggaaacgcctggtatctttatagtcctgtcgggtttcgccacctctgacttgagcgtcgatttttgtgatgctcgtcaggggggcggagcctatggaaaaacgccagcaacgcggcctttttacgg

SEQ ID NO: 692 - DNA, 8152 bp, Artificial Sequence
  pC-T-I-Luc-dSV
ttcctattaatagtaatcaattacggggtcattagttcatagcccatatatggagttccgcgttacataacttacggtaaatggcccgcctggctgaccgcccaacgacccccgcccattgacgtcaataatgacgtatgttcccatagtaacgccaatagggactttccattgacgtcaatgggtggagtatttacggtaaactgcccacttggcagtacatcaagtgtatcatatgccaagtacgccccctattgacgtcaatgacggtaaatggcccgcctggcattatgcccagtacatgaccttatgggactttcctacttggcagtacatctacgtattagtcatcgctattaccatggtgatgcggttttggcagtacatcaatgggcgtggatagcggtttgactcacggggatttccaagtctccaccccattgacgtcaatgggagtttgttttggcaccaaaatcaacgggactttccaaaatgtcgtaacaactccgccccattgacgcaaatgggcggtaggcgtgtacggtgggaggtctatataagcagagctggtttagtgaaccgtcagatccgctagcacaaccatggacaaagtgctgaatagggaggaaagtctgcaactgatggatctgttgggacttgagaggtctgcatggggtaatatcccacttatgaggaaagcatacctgaagaagtgtaaagagttccatcctgacaaaggtggagatgaagagaagatgaaaaagatgaacacactgtataagaaaatggaagatggtgtaaagtatgctcaccagccagattttggaggtttttgggatgccacagagatacctacttatggtacagatgagtgggaacagtggtggaatgcatttaatgaagagaatttgttttgctctgaggaaatgcctagttctgatgatgaggccacagctgactcccagcacagtactccacccaagaaaaagagaaaagtggaagacccaaaggatttcccctctgaactcttgtccttcttgtctcatgcagtgttctcaaataggaccctggcttgctttgctatctacactactaaggagaaggcagctctcttgtacaagaaaatcatggaaaagtattctgtcacctttatttccaggcacaactcctataatcataatattctctttttcttgacaccccataggcatagggtgagtgcaattaacaactatgctcagaagttgtgtactttctccttcctgatctgtaagggtgtgaataaggagtatctcatgtattcagccctgaccagagacccctttagtgtgattgaagaatccctgcctggtgggctcaaggagcatgatttcaacccagaagaggctgaagaaacaaaacaggtgagctggaagcttgtgactgaatatgcaatggagacaaagtgtgatgatgtcctgctcctcctgggaatgtacctggaatttcagtatagctttgaaatgtgtctgaaatgtatcaaaaaggaacagccttctcattataagtatcatgaaaagcactatgccaatgcagctatatttgcagattctaaaaaccagaaaaccatttgtcagcaagctgttgacacagttctggccaagaaaagagtagactctctccagcttaccagggagcagatgttgacaaataggttcaatgaccttctggacagaatggacataatgtttggctcaactggatctgcagatatagaggagtggatggctggagtggcctggctgcactgtctcctccctaaaatggacagtgtagtctatgacttccttaagtgtatggtctataatatccctaaaaagagatactggttgttcaagggacccattgattcagggaaaactacccttgctgctgcacttctggaactctgtggtgggaaagctctcaatgtcaacctgccacttgatagactcaactttgagctgggggtggcaattgatcagtttttggtagtgtttgaagatgtgaaaggtacaggaggagagtccagggatttgcctagtggccaaggcatcaacaatctggacaacctcagagactacctggatgggtctgtaaaggtcaaccttgaaaaaaagcatctcaacaagaggactcaaatatttccacctggaatagtcactatgaatgaatattcagtgcccaagaccctccaggctagatttgtcaagcaaattgatttcagacctaaagattatctgaaacattgtttggagaggagtgagttcctccttgagaaaaggattattcagtcaggaatagcactgcttcttatgctgatatggtatagaccagtggctgagtttgcccaaagcattcagagtagaatagttgagtggaaagaaaggcttgacaaggagttttctctttcagtatatcaaaagatgaagttcaatgtggctatgggtattggagtgcttgattggttgagaaacagtgatgatgatgatgaagattctcaggaaaatgctgataaaaatgaggatgggggagagaagaatatggaagattctggtcatgaaactggcattgatagtcagagccaggggagtttccaggctccacagagctcccaaagtgtccatgaccacaaccagccttaccatatatgcagaggttttacttgtttcaagaaacctcccactccccctccagaacctgaaacatgaggatccgcccctctccctcccccccccctaacgttactggccgaagccgcttggaataaggccggtgtgcgtttgtctatatgttattttccaccatattgccgtcttttggcaatgtgagggcccggaaacctggccctgtcttcttgacgagcattcctaggggtctttcccctctcgccaaaggaatgcaaggtctgttgaatgtcgtgaaggaagcagttcctctggaagcttcttgaagacaaacaacgtctgtagcgaccctttgcaggcagcggaaccccccacctggcgacaggtgcctctgcggccaaaagccacgtgtataagatacacctgcaaaggcggcacaaccccagtgccacgttgtgagttggatagttgtggaaagagtcaaatggctctcctcaagcgtattcaacaaggggctgaaggatgcccagaaggtaccccattgtatgggatctgatctggggcctcggtgcacatgctttacatgtgtttagtcgaggttaaaaaaacgtctaggccccccgaaccacggggacgtggttttcctttgaaaaacacgatgataatatggccacaaccatggaagacgccaaaaacataaagaaaggcccggcgccattctatcctctagaggatggaaccgctggagagcaactgcataaggctatgaagagatacgccctggttcctggaacaattgcttttacagatgcacatatcgaggtgaacatcacgtacgcggaatacttcgaaatgtccgttcggttggcagaagctatgaaacgatatgggctgaatacaaatcacagaatcgtcgtatgcagtgaaaactctcttcaattctttatgccggtgttgggcgcgttatttatcggagttgcagttgcgcccgcgaacgacatttataatgaacgtgaattgctcaacagtatgaacatttcgcagcctaccgtagtgtttgtttccaaaaaggggttgcaaaaaattttgaacgtgcaaaaaaaattaccaataatccagaaaattattatcatggattctaaaacggattaccagggatttcagtcgatgtacacgttcgtcacatctcatctacctcccggttttaatgaatacgattttgtaccagagtcctttgatcgtgacaaaacaattgcactgataatgaattcctctggatctactgggttacctaagggtgtggcccttccgcatagaactgcctgcgtcagattctcgcatgccagagatcctatttttggcaatcaaatcattccggatactgcgattttaagtgttgttccattccatcacggttttggaatgtttactacactcggatatttgatatgtggatttcgagtcgtcttaatgtatagatttgaagaagagctgtttttacgatcccttcaggattacaaaattcaaagtgcgttgctagtaccaaccctattttcattcttcgccaaaagcactctgattgacaaatacgatttatctaatttacacgaaattgcttctgggggcgcacctctttcgaaagaagtcggggaagcggttgcaaaacgcttccatcttccagggatacgacaaggatatgggctcactgagactacatcagctattctgattacacccgagggggatgataaaccgggcgcggtcggtaaagttgttccattttttgaagcgaaggttgtggatctggataccgggaaaacgctgggcgttaatcagagaggcgaattatgtgtcagaggacctatgattatgtccggttatgtaaacaatccggaagcgaccaacgccttgattgacaaggatggatggctacattctggagacatagcttactgggacgaagacgaacacttcttcatagttgaccgcttgaagtctttaattaaatacaaaggatatcaggtggcccccgctgaattggaatcgatattgttacaacaccccaacatcttcgacgcgggcgtggcaggtcttcccgacgatgacgccggtgaacttcccgccgccgttgttgttttggagcacggaaagacgatgacggaaaaagagatcgtggattacgtcgccagtcaagtaacaaccgcgaaaaagttgcgcggaggagttgtgtttgtggacgaagtaccgaaaggtcttaccggaaaactcgacgcaagaaaaatcagagagatcctcataaaggccaagaagggcggaaagtccaaattgtaatgagcggccgcgactctagatcataatcagccataccacacctccccctgaacctgaaaaatcaatgcaattattgttgaaataaagcacccagcaatgcctgggaccatgtaaaactgtcctggttctttccaaggtatagagcatagcccacaggctgatatttctggccagggttggttggaggacagccttgtctataggaagagaatgaggtttttgcactataagggcatgcaagtcagtcccgcccctaactccacctggttaggaggggaggaggattaataaattgacatatctacctaatttgtgtataataaccctgataaatgcttcaataatattgaaaaaggaagagtcctgtataaaaagaaccagctgtggaatgtgtgtcagttagtaggcttatgcaaagtagcccgcccaagagacaggctgaggcccgcccaccatgatagaacaagatggacttcatgctggatctcctgcagcatgggtggaaagactttttggttatgattgggctcagcagaccattggatgttctgatgctgctgtgttcaggcttagtgcacagggtaggccagtgctctttgtgaagactgatctctctggagctttgaatgaactgcaggatgaggctgctaggctttcatggctggccaccacaggtgtcccttgtgctgcagtgttggatgtggttactgaggctgggagggattggctcctcctgggagaagtgccaggtcaggatctgttgagttctcacctggctccagctgaaaaagtctccataatggcagatgctatgagaaggctgcacacattggacccagctacatgcccatttgaccatcaggccaaacacaggattgagagggccagaacaagaatggaggctgggttggtggaccaggatgaccttgatgaggagcatcagggcctggctccagctgaattgtttgccaggctcaaggctagtatgcctgatggggaggatctggtggtaactcatggtgatgcctgtttgcctaacatcatggtggaaaatggaaggttctctggattcattgattgtggaagactgggtgtagctgacaggtatcaggacatagctcttgcaacaagggatattgcagaggagttgggtggagaatgggctgacaggttcctggtcttgtatggcattgctgccccagacagccaaagaattgctttctataggctgttggatgagtttttctaagctcagcacccacaaagctctcaggtcctaagagacactggcacccatatccatgcatcccttgtataaataaagcatccagcaaagctggtaccatgtaaaactgtcttggttgtttccaaggtatagagcatagctcaataggtttttgactttgtcccgcccctctaagtcctgcacacagatactccaatatgacatacagcatgcttgggaactgagtgcccccatgtgggcagagagcaccatgtgccacagtccctgagaagttcttgggaagggtgggcaattgccatgtgtgcctagagaaggttgtttgtaatactgccaagtgccatgtggtgtgatattggctccatgtgccttgtttgtaataacatttccatgtgtcttgggaagaaccatatataagcagagctggtttagtgaaccctcagataggcctagaccatggccagcagtgagaatgtcataacagagttcatgagattcaaggtgaggatggagggaactgtcaatggtcatgagtttgagattgaaggggaaggggagggcagaccctatgagggccacaacacagtcaaattgaaggtgaccaaagggggaccccttccctttgcctgggacatcctgagcccacagtttcagtatggttccaaagtttatgtaaagcaccctgctgacatccctgactacaagaaactgtccttcccagaaggattcaagtgggaaagggtcatgaactttgaggatggaggggttgcaacagtgacccaggacagttctctccaagatggctgtttcatctacaaggtaaaattcattggtgtgaactttccctctgatggcccagtgatgcaaaaaaagaccatgggctgggaagcctcaacagaaaggctgtaccctagagatggagttctcaagggtgagacccacaaagctctaaagctcaaagatgggggccactatctggtggagttcaagagcatctacatggcaaaaaagccagtgcagttgcctggctattactatgtggatgccaagcttgacataacctcacacaatgaagactacactattgtggaacagtatgagaggactgagggaagacatcatctgtttctgtgaattcgcactgcatggacttacctgcctggtggtatcagtcacaggctctgataaggattcagctgttgtataaataaagcatgcagcctagcaggaaccatgttaatctctcttggttgtttccttggaatactcctaagcacattaggtttttagatctgtagaaaagatcaaaggatcttcttgagatcctttttttctgcgcgtaatctgctgcttgcaaacaaaaaaaccaccgctaccagcggtggtttgtttgccggatcaagagctaccaactctttttccgaaggtaactggcttcagcagagcgcagataccaaatactgtccttctagtgtagccgtagttaggccaccacttcaagaactctgtagcaccgcctacatacctcgctctgctaatcctgttaccagtggctgctgccagtggcgataagtcgtgtcttaccgggttggactcaagacgatagttaccggataaggcgcagcggtcgggctgaacggggggttcgtgcacacagcccagcttggagcgaacgacctacaccgaactgagatacctacagcgtgagctatgagaaagcgccacgcttcccgaagggagaaaggcggacaggtatccggtaagcggcagggtcggaacaggagagcgcacgagggagcttccagggggaaacgcctggtatctttatagtcctgtcgggtttcgccacctctgacttgagcgtcgatttttgtgatgctcgtcaggggggcggagcctatggaaaaacgccagcaacgcggcctttttacgg

SEQ ID NO: 693 - DNA, 8627 bp, Artificial Sequence
  pC-T-I-GALV-BB3
ttcctattaatagtaatcaattacggggtcattagttcatagcccatatatggagttccgcgttacataacttacggtaaatggcccgcctggctgaccgcccaacgacccccgcccattgacgtcaataatgacgtatgttcccatagtaacgccaatagggactttccattgacgtcaatgggtggagtatttacggtaaactgcccacttggcagtacatcaagtgtatcatatgccaagtacgccccctattgacgtcaatgacggtaaatggcccgcctggcattatgcccagtacatgaccttatgggactttcctacttggcagtacatctacgtattagtcatcgctattaccatggtgatgcggttttggcagtacatcaatgggcgtggatagcggtttgactcacggggatttccaagtctccaccccattgacgtcaatgggagtttgttttggcaccaaaatcaacgggactttccaaaatgtcgtaacaactccgccccattgacgcaaatgggcggtaggcgtgtacggtgggaggtctatataagcagagctggtttagtgaaccgtcagatccgctagcacaaccatggacaaagtgctgaatagggaggaaagtctgcaactgatggatctgttgggacttgagaggtctgcatggggtaatatcccacttatgaggaaagcatacctgaagaagtgtaaagagttccatcctgacaaaggtggagatgaagagaagatgaaaaagatgaacacactgtataagaaaatggaagatggtgtaaagtatgctcaccagccagattttggaggtttttgggatgccacagagatacctacttatggtacagatgagtgggaacagtggtggaatgcatttaatgaagagaatttgttttgctctgaggaaatgcctagttctgatgatgaggccacagctgactcccagcacagtactccacccaagaaaaagagaaaagtggaagacccaaaggatttcccctctgaactcttgtccttcttgtctcatgcagtgttctcaaataggaccctggcttgctttgctatctacactactaaggagaaggcagctctcttgtacaagaaaatcatggaaaagtattctgtcacctttatttccaggcacaactcctataatcataatattctctttttcttgacaccccataggcatagggtgagtgcaattaacaactatgctcagaagttgtgtactttctccttcctgatctgtaagggtgtgaataaggagtatctcatgtattcagccctgaccagagacccctttagtgtgattgaagaatccctgcctggtgggctcaaggagcatgatttcaacccagaagaggctgaagaaacaaaacaggtgagctggaagcttgtgactgaatatgcaatggagacaaagtgtgatgatgtcctgctcctcctgggaatgtacctggaatttcagtatagctttgaaatgtgtctgaaatgtatcaaaaaggaacagccttctcattataagtatcatgaaaagcactatgccaatgcagctatatttgcagattctaaaaaccagaaaaccatttgtcagcaagctgttgacacagttctggccaagaaaagagtagactctctccagcttaccagggagcagatgttgacaaataggttcaatgaccttctggacagaatggacataatgtttggctcaactggatctgcagatatagaggagtggatggctggagtggcctggctgcactgtctcctccctaaaatggacagtgtagtctatgacttccttaagtgtatggtctataatatccctaaaaagagatactggttgttcaagggacccattgattcagggaaaactacccttgctgctgcacttctggaactctgtggtgggaaagctctcaatgtcaacctgccacttgatagactcaactttgagctgggggtggcaattgatcagtttttggtagtgtttgaagatgtgaaaggtacaggaggagagtccagggatttgcctagtggccaaggcatcaacaatctggacaacctcagagactacctggatgggtctgtaaaggtcaaccttgaaaaaaagcatctcaacaagaggactcaaatatttccacctggaatagtcactatgaatgaatattcagtgcccaagaccctccaggctagatttgtcaagcaaattgatttcagacctaaagattatctgaaacattgtttggagaggagtgagttcctccttgagaaaaggattattcagtcaggaatagcactgcttcttatgctgatatggtatagaccagtggctgagtttgcccaaagcattcagagtagaatagttgagtggaaagaaaggcttgacaaggagttttctctttcagtatatcaaaagatgaagttcaatgtggctatgggtattggagtgcttgattggttgagaaacagtgatgatgatgatgaagattctcaggaaaatgctgataaaaatgaggatgggggagagaagaatatggaagattctggtcatgaaactggcattgatagtcagagccaggggagtttccaggctccacagagctcccaaagtgtccatgaccacaaccagccttaccatatatgcagaggttttacttgtttcaagaaacctcccactccccctccagaacctgaaacatgaggatccgcccctctccctcccccccccctaacgttactggccgaagccgcttggaataaggccggtgtgcgtttgtctatatgttattttccaccatattgccgtcttttggcaatgtgagggcccggaaacctggccctgtcttcttgacgagcattcctaggggtctttcccctctcgccaaaggaatgcaaggtctgttgaatgtcgtgaaggaagcagttcctctggaagcttcttgaagacaaacaacgtctgtagcgaccctttgcaggcagcggaaccccccacctggcgacaggtgcctctgcggccaaaagccacgtgtataagatacacctgcaaaggcggcacaaccccagtgccacgttgtgagttggatagttgtggaaagagtcaaatggctctcctcaagcgtattcaacaaggggctgaaggatgcccagaaggtaccccattgtatgggatctgatctggggcctcggtgcacatgctttacatgtgtttagtcgaggttaaaaaaacgtctaggccccccgaaccacggggacgtggttttcctttgaaaaacacgatgataatatggccacaaccatggtcctgctgccaggctcaatgctgctgaccagcaatctccaccacctgagacaccagatgtcacctgggtcctggaagagacttatcattcttctgtcctgtgtgtttgggggtggaggcaccagcctgcaaaataagaacccacatcagcccatgaccctcacctggcaggtcctgagccagacaggtgatgttgtctgggataccaaagcagtccagcccccctggacttggtggcccaccttgaaacctgatgtctgtgccctggcagctagtctggagagctgggacatcccaggcactgatgtcagcagcagcaagagggttaggccacctgacagtgactacactgcagcctacaagcagatcacctggggagccattggctgctcctaccctagagctagaaccagaatggcctccagtaccttctatgtctgccctagagatggcagaactctgtctgaggccaggagatgtggtggactggaatccctctactgcaaagagtgggactgtgagactactggcacaggctattggttgtccaagtcatccaaggacttgatcactgtgaagtgggatcagaattcagagtggacccagaaatttcagcaatgccaccagacaggctggtgcaaccccttgaagattgactttacagataaggggaagctcagtaaagactggatcacaggcaaaacctggggactgaggttctatgtttctggccatccaggtgttcagttcaccatcagattgaaaatcaccaatatgccagctgtggcagtgggtcctgaccttgtgctggtggaacagggcccacccaggacatccttggccttgcctccacccctccctcccagggaagccccccctccaagcttgcctgactccaattctacagctctggctactagtgcccaaactcctactgtgaggaagaccattgtcacactcaatacaccccctccaactacaggagacaggttgtttgaccttgtgcaaggtgccttccttacacttaatgccaccaaccctggagccacagaaagttgttggctgtgcctggcaatgggtccaccctactatgaggcaattgcaagttctggtgaagtggcatatagcactgacctggatagatgtaggtgggggacccagggaaaactcacacttactgaagtgagtgggcatggcctgtgcattggaaaagtcccattcacacaccaacatctgtgcaaccaaacactctccatcaactcttctggtgaccaccagtacctgcttccaagcaaccacagctggtgggcctgcagcactgggctgaccccctgcctgagcacctctgtgttcaatcagacaagagatttctgtatccaggtgcagctcattcccagaatctactactatcctgaggaggtgctgctgcaagcctatgacaacagtcatcccaggactaagagggaagcagtgagtctcaccctggctgttctgctgggcctgggaatcacagctgggattggtacaggctcaacagcccttatcaagggccccattgacctgcagcaaggactgacttcccttcagattgcaattgatgctgatctgagagccctgcaggattctgtgtccaaactggaggacagccttacctctctctcagaagtggttcttcagaacaggagaggactggacttgctctttctcaaagagggagggctttgtgctgccctcaaggaggagtgttgcttttacattgatcattctggggctgttagagattcaatgaaaaagctcaaggagaaattggataaaaggcagctggaaagacagaagtctcaaaactggtatgaagggtggttcaacaatagtccttggttcactaccttgctgagcactattgctggcccactcttgctgctgttgctcctgctcatcctggggccctgtatcatcaacaagctggtgcagtttatcaatgacaggatcagtgcctgctgagcggccgcgactctagatcataatcagccataccacacctccccctgaacctgaaaaatcaatgcaattattgttgaaataaagcacccagcaatgcctgggaccatgtaaaactgtcctggttctttccaaggtatagagcatagcccacaggctgatatttctggccagggttggttggaggacagccttgtctataggaagagaatgaggtttttgcactataagggcatgcaagtcagtcccgcccctaactccacctggttgcccatcccgcccctaactccgcccagttccgcccattctccgccccatggctgactaattttttttatttatgcagaggcggaggccgcctcggcctctgagctattccagaagtagtgaggaggcttttttggaggcccttaattaaattgacatatctacctaatttgtgtataataaccctgataaatgcttcaataatattgaaaaaggaagagtcctgtataaaaagaaccagctgtggaatgtgtgtcagttagtaggcttatgcaaagtagcccgcccaagagacaggctgaggcccgcccaccatgatagaacaagatggacttcatgctggatctcctgcagcatgggtggaaagactttttggttatgattgggctcagcagaccattggatgttctgatgctgctgtgttcaggcttagtgcacagggtaggccagtgctctttgtgaagactgatctctctggagctttgaatgaactgcaggatgaggctgctaggctttcatggctggccaccacaggtgtcccttgtgctgcagtgttggatgtggttactgaggctgggagggattggctcctcctgggagaagtgccaggtcaggatctgttgagttctcacctggctccagctgaaaaagtctccataatggcagatgctatgagaaggctgcacacattggacccagctacatgcccatttgaccatcaggccaaacacaggattgagagggccagaacaagaatggaggctgggttggtggaccaggatgaccttgatgaggagcatcagggcctggctccagctgaattgtttgccaggctcaaggctagtatgcctgatggggaggatctggtggtaactcatggtgatgcctgtttgcctaacatcatggtggaaaatggaaggttctctggattcattgattgtggaagactgggtgtagctgacaggtatcaggacatagctcttgcaacaagggatattgcagaggagttgggtggagaatgggctgacaggttcctggtcttgtatggcattgctgccccagacagccaaagaattgctttctataggctgttggatgagtttttctaagctcagcacccacaaagctctcaggtcctaagagacactggcacccatatccatgcatcccttgtataaataaagcatccagcaaagctggtaccatgtaaaactgtcttggttgtttccaaggtatagagcatagctcaataggtttttgactttgtcccgcccctctaagtcctgcacacagatactccaatatgacatacagcatgcttgggaactgagtgcccccatgtgggcagagagcaccatgtgccacagtccctgagaagttcttgggaagggtgggcaattgccatgtgtgcctagagaaggttgtttgtaatactgccaagtgccatgtggtgtgatattggctccatgtgccttgtttgtaataacatttccatgtgtcttgggaagaaccatatataagcagagctggtttagtgaaccctcagataggcctagaccatggccagcagtgagaatgtcataacagagttcatgagattcaaggtgaggatggagggaactgtcaatggtcatgagtttgagattgaaggggaaggggagggcagaccctatgagggccacaacacagtcaaattgaaggtgaccaaagggggaccccttccctttgcctgggacatcctgagcccacagtttcagtatggttccaaagtttatgtaaagcaccctgctgacatccctgactacaagaaactgtccttcccagaaggattcaagtgggaaagggtcatgaactttgaggatggaggggttgcaacagtgacccaggacagttctctccaagatggctgtttcatctacaaggtaaaattcattggtgtgaactttccctctgatggcccagtgatgcaaaaaaagaccatgggctgggaagcctcaacagaaaggctgtaccctagagatggagttctcaagggtgagacccacaaagctctaaagctcaaagatgggggccactatctggtggagttcaagagcatctacatggcaaaaaagccagtgcagttgcctggctattactatgtggatgccaagcttgacataacctcacacaatgaagactacactattgtggaacagtatgagaggactgagggaagacatcatctgtttctgtgaattcgcactgcatggacttacctgcctggtggtatcagtcacaggctctgataaggattcagctgttgtataaataaagcatgcagcctagcaggaaccatgttaatctctcttggttgtttccttggaatactcctaagcacattaggtttttagatctgtagaaaagatcaaaggatcttcttgagatcctttttttctgcgcgtaatctgctgcttgcaaacaaaaaaaccaccgctaccagcggtggtttgtttgccggatcaagagctaccaactctttttccgaaggtaactggcttcagcagagcgcagataccaaatactgtccttctagtgtagccgtagttaggccaccacttcaagaactctgtagcaccgcctacatacctcgctctgctaatcctgttaccagtggctgctgccagtggcgataagtcgtgtcttaccgggttggactcaagacgatagttaccggataaggcgcagcggtcgggctgaacggggggttcgtgcacacagcccagcttggagcgaacgacctacaccgaactgagatacctacagcgtgagctatgagaaagcgccacgcttcccgaagggagaaaggcggacaggtatccggtaagcggcagggtcggaacaggagagcgcacgagggagcttccagggggaaacgcctggtatctttatagtcctgtcgggtttcgccacctctgacttgagcgtcgatttttgtgatgctcgtcaggggggcggagcctatggaaaaacgccagcaacgcggcctttttacgg

SEQ ID NO: 694 - DNA, 5307 bp, Artificial Sequence
  pIRES2-zGFP (pC-I-zGFP)
tagttattaatagtaatcaattacggggtcattagttcatagcccatatatggagttccgcgttacataacttacggtaaatggcccgcctggctgaccgcccaacgacccccgcccattgacgtcaataatgacgtatgttcccatagtaacgccaatagggactttccattgacgtcaatgggtggagtatttacggtaaactgcccacttggcagtacatcaagtgtatcatatgccaagtacgccccctattgacgtcaatgacggtaaatggcccgcctggcattatgcccagtacatgaccttatgggactttcctacttggcagtacatctacgtattagtcatcgctattaccatggtgatgcggttttggcagtacatcaatgggcgtggatagcggtttgactcacggggatttccaagtctccaccccattgacgtcaatgggagtttgttttggcaccaaaatcaacgggactttccaaaatgtcgtaacaactccgccccattgacgcaaatgggcggtaggcgtgtacggtgggaggtctatataagcagagctggtttagtgaaccgtcagatccgctagcgctaccggactcagatctcgagctcaagcttcgaattctgcagtcgacggtaccgcgggcccgggatccgcccctctccctcccccccccctaacgttactggccgaagccgcttggaataaggccggtgtgcgtttgtctatatgttattttccaccatattgccgtcttttggcaatgtgagggcccggaaacctggccctgtcttcttgacgagcattcctaggggtctttcccctctcgccaaaggaatgcaaggtctgttgaatgtcgtgaaggaagcagttcctctggaagcttcttgaagacaaacaacgtctgtagcgaccctttgcaggcagcggaaccccccacctggcgacaggtgcctctgcggccaaaagccacgtgtataagatacacctgcaaaggcggcacaaccccagtgccacgttgtgagttggatagttgtggaaagagtcaaatggctctcctcaagcgtattcaacaaggggctgaaggatgcccagaaggtaccccattgtatgggatctgatctggggcctcggtgcacatgctttacatgtgtttagtcgaggttaaaaaaacgtctaggccccccgaaccacggggacgtggttttcctttgaaaaacacgatgataatatggccacaaccatggtgagcaagggagaggaactctttacaggtgtggtcccaattctggtggagctggatggagatgtgaatgggcacaaattttctgtcagtggagagggagagggggatgctacctatggcaaactgactctgaagttcatctgcactactggcaagctgcctgtgccatggccaactctggtgacaaccctcacctatggagtccagtgcttttccagatatcctgaccacatgaaacagcatgactttttcaaatctgcaatgcctgagggctatgtgcaagagagaactatctttttcaaggatgatgggaactataagactagggctgaggtgaaatttgaaggagacaccctggtcaataggattgagctcaaggggattgacttcaaggaggatggcaacattctgggccataagctggagtataattacaattcccacaatgtctacattatggctgacaagcagaagaatggcattaaggtcaacttcaagattagacacaacatagaggatggatctgtgcagctggctgaccattaccagcagaatacacctattggggatgggccagtgctgctccctgacaatcactatctgagcacccaatctgctttgtctaaagatcctaatgaaaagagagatcacatggtgctgctggagtttgtaactgctgcaggaattaccttgggtatggatgaactctataagtaagcggccgcgactctagatcataatcagccataccacatttgtagaggttttacttgctttaaaaaacctcccacacctccccctgaacctgaaacataaaatgaatgcaattgttgttgttaacttgtttattgcagcttataatggttacaaataaagcaatagcatcacaaatttcacaaataaagcatttttttcactgcattctagttgtggtttgtccaaactcatcaatgtatcttaaggcgtaaattgtaagcgttaatattttgttaaaattcgcgttaaatttttgttaaatcagctcattttttaaccaataggccgaaatcggcaaaatcccttataaatcaaaagaatagaccgagatagggttgagtgttgttccagtttggaacaagagtccactattaaagaacgtggactccaacgtcaaagggcgaaaaaccgtctatcagggcgatggcccactacgtgaaccatcaccctaatcaagttttttggggtcgaggtgccgtaaagcactaaatcggaaccctaaagggagcccccgatttagagcttgacggggaaagccggcgaacgtggcgagaaaggaagggaagaaagcgaaaggagcgggcgctagggcgctggcaagtgtagcggtcacgctgcgcgtaaccaccacacccgccgcgcttaatgcgccgctacagggcgcgtcaggtggcacttttcggggaaatgtgcgcggaacccctatttgtttatttttctaaatacattcaaatatgtatccgctcatgagacaataaccctgataaatgcttcaataatattgaaaaaggaagagtcctgaggcggaaagaaccagctgtggaatgtgtgtcagttagggtgtggaaagtccccaggctccccagcaggcagaagtatgcaaagcatgcatctcaattagtcagcaaccaggtgtggaaagtccccaggctccccagcaggcagaagtatgcaaagcatgcatctcaattagtcagcaaccatagtcccgcccctaactccgcccatcccgcccctaactccgcccagttccgcccattctccgccccatggctgactaattttttttatttatgcagaggccgaggccgcctcggcctctgagctattccagaagtagtgaggaggcttttttggaggcctaggcttttgcaaagatcgatcaagagacaggatgaggatcgtttcgcatgattgaacaagatggattgcacgcaggttctccggccgcttgggtggagaggctattcggctatgactgggcacaacagacaatcggctgctctgatgccgccgtgttccggctgtcagcgcaggggcgcccggttctttttgtcaagaccgacctgtccggtgccctgaatgaactgcaagacgaggcagcgcggctatcgtggctggccacgacgggcgttccttgcgcagctgtgctcgacgttgtcactgaagcgggaagggactggctgctattgggcgaagtgccggggcaggatctcctgtcatctcaccttgctcctgccgagaaagtatccatcatggctgatgcaatgcggcggctgcatacgcttgatccggctacctgcccattcgaccaccaagcgaaacatcgcatcgagcgagcacgtactcggatggaagccggtcttgtcgatcaggatgatctggacgaagagcatcaggggctcgcgccagccgaactgttcgccaggctcaaggcgagcatgcccgacggcgaggatctcgtcgtgacccatggcgatgcctgcttgccgaatatcatggtggaaaatggccgcttttctggattcatcgactgtggccggctgggtgtggcggaccgctatcaggacatagcgttggctacccgtgatattgctgaagagcttggcggcgaatgggctgaccgcttcctcgtgctttacggtatcgccgctcccgattcgcagcgcatcgccttctatcgccttcttgacgagttcttctgagcgggactctggggttcgaaatgaccgaccaagcgacgcccaacctgccatcacgagatttcgattccaccgccgccttctatgaaaggttgggcttcggaatcgttttccgggacgccggctggatgatcctccagcgcggggatctcatgctggagttcttcgcccaccctagggggaggctaactgaaacacggaaggagacaataccggaaggaacccgcgctatgacggcaataaaaagacagaataaaacgcacggtgttgggtcgtttgttcataaacgcggggttcggtcccagggctggcactctgtcgataccccaccgagaccccattggggccaatacgcccgcgtttcttccttttccccaccccaccccccaagttcgggtgaaggcccagggctcgcagccaacgtcggggcggcaggccctgccatagcctcaggttactcatatatactttagattgatttaaaacttcatttttaatttaaaaggatctaggtgaagatcctttttgataatctcatgaccaaaatcccttaacgtgagttttcgttccactgagcgtcagaccccgtagaaaagatcaaaggatcttcttgagatcctttttttctgcgcgtaatctgctgcttgcaaacaaaaaaaccaccgctaccagcggtggtttgtttgccggatcaagagctaccaactctttttccgaaggtaactggcttcagcagagcgcagataccaaatactgtccttctagtgtagccgtagttaggccaccacttcaagaactctgtagcaccgcctacatacctcgctctgctaatcctgttaccagtggctgctgccagtggcgataagtcgtgtcttaccgggttggactcaagacgatagttaccggataaggcgcagcggtcgggctgaacggggggttcgtgcacacagcccagcttggagcgaacgacctacaccgaactgagatacctacagcgtgagctatgagaaagcgccacgcttcccgaagggagaaaggcggacaggtatccggtaagcggcagggtcggaacaggagagcgcacgagggagcttccagggggaaacgcctggtatctttatagtcctgtcgggtttcgccacctctgacttgagcgtcgatttttgtgatgctcgtcaggggggcggagcctatggaaaaacgccagcaacgcggcctttttacggttcctggccttttgctggccttttgctcacatgttctttcctgcgttatcccctgattctgtggataaccgtattaccgccatgcat

SEQ ID NO: 695 - DNA, 7389 bp, Artificial Sequence
  pC-T-I-EGFP
  CDS (605)...(2728): Large T Antigen
tagttattaatagtaatcaattacggggtcattagttcatagcccatatatggagttccgcgttacataacttacggtaaatggcccgcctggctgaccgcccaacgacccccgcccattgacgtcaataatgacgtatgttcccatagtaacgccaatagggactttccattgacgtcaatgggtggagtatttacggtaaactgcccacttggcagtacatcaagtgtatcatatgccaagtacgccccctattgacgtcaatgacggtaaatggcccgcctggcattatgcccagtacatgaccttatgggactttcctacttggcagtacatctacgtattagtcatcgctattaccatggtgatgcggttttggcagtacatcaatgggcgtggatagcggtttgactcacggggatttccaagtctccaccccattgacgtcaatgggagtttgttttggcaccaaaatcaacgggactttccaaaatgtcgtaacaactccgccccattgacgcaaatgggcggtaggcgtgtacggtgggaggtctatataagcagagctggtttagtgaaccgtcagatccgctagcccacaaccatggacaaagtgctgaatagggaggaaagtctgcaactgatggatctgttgggacttgagaggtctgcatggggtaatatcccacttatgaggaaagcatacctgaagaagtgtaaagagttccatcctgacaaaggtggagatgaagagaagatgaaaaagatgaacacactgtataagaaaatggaagatggtgtaaagtatgctcaccagccagattttggaggtttttgggatgccacagagatacctacttatggtacagatgagtgggaacagtggtggaatgcatttaatgaagagaatttgttttgctctgaggaaatgcctagttctgatgatgaggccacagctgactcccagcacagtactccacccaagaaaaagagaaaagtggaagacccaaaggatttcccctctgaactcttgtccttcttgtctcatgcagtgttctcaaataggaccctggcttgctttgctatctacactactaaggagaaggcagctctcttgtacaagaaaatcatggaaaagtattctgtcacctttatttccaggcacaactcctataatcataatattctctttttcttgacaccccataggcatagggtgagtgcaattaacaactatgctcagaagttgtgtactttctccttcctgatctgtaagggtgtgaataaggagtatctcatgtattcagccctgaccagagacccctttagtgtgattgaagaatccctgcctggtgggctcaaggagcatgatttcaacccagaagaggctgaagaaacaaaacaggtgagctggaagcttgtgactgaatatgcaatggagacaaagtgtgatgatgtcctgctcctcctgggaatgtacctggaatttcagtatagctttgaaatgtgtctgaaatgtatcaaaaaggaacagccttctcattataagtatcatgaaaagcactatgccaatgcagctatatttgcagattctaaaaaccagaaaaccatttgtcagcaagctgttgacacagttctggccaagaaaagagtagactctctccagcttaccagggagcagatgttgacaaataggttcaatgaccttctggacagaatggacataatgtttggctcaactggatctgcagatatagaggagtggatggctggagtggcctggctgcactgtctcctccctaaaatggacagtgtagtctatgacttccttaagtgtatggtctataatatccctaaaaagagatactggttgttcaagggacccattgattcagggaaaactacccttgctgctgcacttctggaactctgtggtgggaaagctctcaatgtcaacctgccacttgatagactcaactttgagctgggggtggcaattgatcagtttttggtagtgtttgaagatgtgaaaggtacaggaggagagtccagggatttgcctagtggccaaggcatcaacaatctggacaacctcagagactacctggatgggtctgtaaaggtcaaccttgaaaaaaagcatctcaacaagaggactcaaatatttccacctggaatagtcactatgaatgaatattcagtgcccaagaccctccaggctagatttgtcaagcaaattgatttcagacctaaagattatctgaaacattgtttggagaggagtgagttcctccttgagaaaaggattattcagtcaggaatagcactgcttcttatgctgatatggtatagaccagtggctgagtttgcccaaagcattcagagtagaatagttgagtggaaagaaaggcttgacaaggagttttctctttcagtatatcaaaagatgaagttcaatgtggctatgggtattggagtgcttgattggttgagaaacagtgatgatgatgatgaagattctcaggaaaatgctgataaaaatgaggatgggggagagaagaatatggaagattctggtcatgaaactggcattgatagtcagagccaggggagtttccaggctccacagagctcccaaagtgtccatgaccacaaccagccttaccatatatgcagaggttttacttgtttcaagaaacctcccactccccctccagaacctgaaacatgagcggccgctggatccgcccctctccctcccccccccctaacgttactggccgaagccgcttggaataaggccggtgtgcgtttgtctatatgttattttccaccatattgccgtcttttggcaatgtgagggcccggaaacctggccctgtcttcttgacgagcattcctaggggtctttcccctctcgccaaaggaatgcaaggtctgttgaatgtcgtgaaggaagcagttcctctggaagcttcttgaagacaaacaacgtctgtagcgaccctttgcaggcagcggaaccccccacctggcgacaggtgcctctgcggccaaaagccacgtgtataagatacacctgcaaaggcggcacaaccccagtgccacgttgtgagttggatagttgtggaaagagtcaaatggctctcctcaagcgtattcaacaaggggctgaaggatgcccagaaggtaccccattgtatgggatctgatctggggcctcggtgcacatgctttacatgtgtttagtcgaggttaaaaaaacgtctaggccccccgaaccacggggacgtggttttcctttgaaaaacacgatgataatatggccacaaccatggtgagcaagggcgaggagctgttcaccggggtggtgcccatcctggtcgagctggacggcgacgtaaacggccacaagttcagcgtgtccggcgagggcgagggcgatgccacctacggcaagctgaccctgaagttcatctgcaccaccggcaagctgcccgtgccctggcccaccctcgtgaccaccctgacctacggcgtgcagtgcttcagccgctaccccgaccacatgaagcagcacgacttcttcaagtccgccatgcccgaaggctacgtccaggagcgcaccatcttcttcaaggacgacggcaactacaagacccgcgccgaggtgaagttcgagggcgacaccctggtgaaccgcatcgagctgaagggcatcgacttcaaggaggacggcaacatcctggggcacaagctggagtacaactacaacagccacaacgtctatatcatggccgacaagcagaagaacggcatcaaggtgaacttcaagatccgccacaacatcgaggacggcagcgtgcagctcgccgaccactaccagcagaacacccccatcggcgacggccccgtgctgctgcccgacaaccactacctgagcacccagtccgccctgagcaaagaccccaacgagaagcgcgatcacatggtcctgctggagttcgtgaccgccgccgggatcactctcggcatggacgagctgtacaagtaaagcggccgcgactctagatcataatcagccataccacatttgtagaggttttacttgctttaaaaaacctcccacacctccccctgaacctgaaacataaaatgaatgcaattgttgttgttaacttgtttattgcagcttataatggttacaaataaagcaatagcatcacaaatttcacaaataaagcatttttttcactgcattctagttgtggtttgtccaaactcatcaatgtatcttaaggcgtaaattgtaagcgttaatattttgttaaaattcgcgttaaatttttgttaaatcagctcattttttaaccaataggccgaaatcggcaaaatcccttataaatcaaaagaatagaccgagatagggttgagtgttgttccagtttggaacaagagtccactattaaagaacgtggactccaacgtcaaagggcgaaaaaccgtctatcagggcgatggcccactacgtgaaccatcaccctaatcaagttttttggggtcgaggtgccgtaaagcactaaatcggaaccctaaagggagcccccgatttagagcttgacggggaaagccggcgaacgtggcgagaaaggaagggaagaaagcgaaaggagcgggcgctagggcgctggcaagtgtagcggtcacgctgcgcgtaaccaccacacccgccgcgcttaatgcgccgctacagggcgcgtcaggtggcacttttcggggaaatgtgcgcggaacccctatttgtttatttttctaaatacattcaaatatgtatccgctcatgagacaataaccctgataaatgcttcaataatattgaaaaaggaagagtcctgaggcggaaagaaccagctgtggaatgtgtgtcagttagggtgtggaaagtccccaggctccccagcaggcagaagtatgcaaagcatgcatctcaattagtcagcaaccaggtgtggaaagtccccaggctccccagcaggcagaagtatgcaaagcatgcatctcaattagtcagcaaccatagtcccgcccctaactccgcccatcccgcccctaactccgcccagttccgcccattctccgccccatggctgactaattttttttatttatgcagaggccgaggccgcctcggcctctgagctattccagaagtagtgaggaggcttttttggaggcctaggcttttgcaaagatcgatcaagagacaggatgaggatcgtttcgcatgattgaacaagatggattgcacgcaggttctccggccgcttgggtggagaggctattcggctatgactgggcacaacagacaatcggctgctctgatgccgccgtgttccggctgtcagcgcaggggcgcccggttctttttgtcaagaccgacctgtccggtgccctgaatgaactgcaagacgaggcagcgcggctatcgtggctggccacgacgggcgttccttgcgcagctgtgctcgacgttgtcactgaagcgggaagggactggctgctattgggcgaagtgccggggcaggatctcctgtcatctcaccttgctcctgccgagaaagtatccatcatggctgatgcaatgcggcggctgcatacgcttgatccggctacctgcccattcgaccaccaagcgaaacatcgcatcgagcgagcacgtactcggatggaagccggtcttgtcgatcaggatgatctggacgaagagcatcaggggctcgcgccagccgaactgttcgccaggctcaaggcgagcatgcccgacggcgaggatctcgtcgtgacccatggcgatgcctgcttgccgaatatcatggtggaaaatggccgcttttctggattcatcgactgtggccggctgggtgtggcggaccgctatcaggacatagcgttggctacccgtgatattgctgaagagcttggcggcgaatgggctgaccgcttcctcgtgctttacggtatcgccgctcccgattcgcagcgcatcgccttctatcgccttcttgacgagttcttctgagcgggactctggggttcgaaatgaccgaccaagcgacgcccaacctgccatcacgagatttcgattccaccgccgccttctatgaaaggttgggcttcggaatcgttttccgggacgccggctggatgatcctccagcgcggggatctcatgctggagttcttcgcccaccctagggggaggctaactgaaacacggaaggagacaataccggaaggaacccgcgctatgacggcaataaaaagacagaataaaacgcacggtgttgggtcgtttgttcataaacgcggggttcggtcccagggctggcactctgtcgataccccaccgagaccccattggggccaatacgcccgcgtttcttccttttccccaccccaccccccaagttcgggtgaaggcccagggctcgcagccaacgtcggggcggcaggccctgccatagcctcaggttactcatatatactttagattgatttaaaacttcatttttaatttaaaaggatctaggtgaagatcctttttgataatctcatgaccaaaatcccttaacgtgagttttcgttccactgagcgtcagaccccgtagaaaagatcaaaggatcttcttgagatcctttttttctgcgcgtaatctgctgcttgcaaacaaaaaaaccaccgctaccagcggtggtttgtttgccggatcaagagctaccaactctttttccgaaggtaactggcttcagcagagcgcagataccaaatactgtccttctagtgtagccgtagttaggccaccacttcaagaactctgtagcaccgcctacatacctcgctctgctaatcctgttaccagtggctgctgccagtggcgataagtcgtgtcttaccgggttggactcaagacgatagttaccggataaggcgcagcggtcgggctgaacggggggttcgtgcacacagcccagcttggagcgaacgacctacaccgaactgagatacctacagcgtgagctatgagaaagcgccacgcttcccgaagggagaaaggcggacaggtatccggtaagcggcagggtcggaacaggagagcgcacgagggagcttccagggggaaacgcctggtatctttatagtcctgtcgggtttcgccacctctgacttgagcgtcgatttttgtgatgctcgtcaggggggcggagcctatggaaaaacgccagcaacgcggcctttttacggttcctggccttttgctggccttttgctcacatgttctttcctgcgttatcccctgattctgtggataaccgtattaccgccatgcat

SEQ ID NO: 696 - DNA, 7378 bp, Artificial Sequence
  pC-T(ss)-I-EGFP
  CDS (603)...(2726): Large T Antigen
tagttattaatagtaatcaattacggggtcattagttcatagcccatatatggagttccgcgttacataacttacggtaaatggcccgcctggctgaccgcccaacgacccccgcccattgacgtcaataatgacgtatgttcccatagtaacgccaatagggactttccattgacgtcaatgggtggagtatttacggtaaactgcccacttggcagtacatcaagtgtatcatatgccaagtacgccccctattgacgtcaatgacggtaaatggcccgcctggcattatgcccagtacatgaccttatgggactttcctacttggcagtacatctacgtattagtcatcgctattaccatggtgatgcggttttggcagtacatcaatgggcgtggatagcggtttgactcacggggatttccaagtctccaccccattgacgtcaatgggagtttgttttggcaccaaaatcaacgggactttccaaaatgtcgtaacaactccgccccattgacgcaaatgggcggtaggcgtgtacggtgggaggtctatataagcagagctggtttagtgaaccgtcagatccgctagcacaaccatggacaaagtgctgaatagggaggaaagtctgcaactgatggatctgttgggacttgagaggtctgcatggggtaatatcccacttatgaggaaagcatacctgaagaagtgtaaagagttccatcctgacaaaggtggagatgaagagaagatgaaaaagatgaacacactgtataagaaaatggaagatggtgtaaagtatgctcaccagccagattttggaggtttttgggatgccacagagatacctacttatggtacagatgagtgggaacagtggtggaatgcatttaatgaagagaatttgttttgctctgaggaaatgcctagttctgatgatgaggccacagctgactcccagcacagtactccacccaagaaaaagagaaaagtggaagacccaaaggatttcccctctgaactcttgtccttcttgtctcatgcagtgttctcaaataggaccctggcttgctttgctatctacactactaaggagaaggcagctctcttgtacaagaaaatcatggaaaagtattctgtcacctttatttccaggcacaactcctataatcataatattctctttttcttgacaccccataggcatagggtgagtgcaattaacaactatgctcagaagttgtgtactttctccttcctgatctgtaagggtgtgaataaggagtatctcatgtattcagccctgaccagagacccctttagtgtgattgaagaatccctgcctggtgggctcaaggagcatgatttcaacccagaagaggctgaagaaacaaaacaggtgagctggaagcttgtgactgaatatgcaatggagacaaagtgtgatgatgtcctgctcctcctgggaatgtacctggaatttcagtatagctttgaaatgtgtctgaaatgtatcaaaaaggaacagccttctcattataagtatcatgaaaagcactatgccaatgcagctatatttgcagattctaaaaaccagaaaaccatttgtcagcaagctgttgacacagttctggccaagaaaagagtagactctctccagcttaccagggagcagatgttgacaaataggttcaatgaccttctggacagaatggacataatgtttggctcaactggatctgcagatatagaggagtggatggctggagtggcctggctgcactgtctcctccctaaaatggacagtgtagtctatgacttccttaagtgtatggtctataatatccctaaaaagagatactggttgttcaagggacccattgattcagggaaaactacccttgctgctgcacttctggaactctgtggtgggaaagctctcaatgtcaacctgccacttgatagactcaactttgagctgggggtggcaattgatcagtttttggtagtgtttgaagatgtgaaaggtacaggaggagagtccagggatttgcctagtggccaaggcatcaacaatctggacaacctcagagactacctggatgggtctgtaaaggtcaaccttgaaaaaaagcatctcaacaagaggactcaaatatttccacctggaatagtcactatgaatgaatattcagtgcccaagaccctccaggctagatttgtcaagcaaattgatttcagacctaaagattatctgaaacattgtttggagaggagtgagttcctccttgagaaaaggattattcagtcaggaatagcactgcttcttatgctgatatggtatagaccagtggctgagtttgcccaaagcattcagagtagaatagttgagtggaaagaaaggcttgacaaggagttttctctttcagtatatcaaaagatgaagttcaatgtggctatgggtattggagtgcttgattggttgagaaacagtgatgatgatgatgaagattctcaggaaaatgctgataaaaatgaggatgggggagagaagaatatggaagattctggtcatgaaactggcattgatagtcagagccaggggagtttccaggctccacagagctcccaaagtgtccatgaccacaaccagccttaccatatatgcagaggttttacttgtttcaagaaacctcccactccccctccagaacctgaaacatgaggatccgcccctctccctcccccccccctaacgttactggccgaagccgcttggaataaggccggtgtgcgtttgtctatatgttattttccaccatattgccgtcttttggcaatgtgagggcccggaaacctggccctgtcttcttgacgagcattcctaggggtctttcccctctcgccaaaggaatgcaaggtctgttgaatgtcgtgaaggaagcagttcctctggaagcttcttgaagacaaacaacgtctgtagcgaccctttgcaggcagcggaaccccccacctggcgacaggtgcctctgcggccaaaagccacgtgtataagatacacctgcaaaggcggcacaaccccagtgccacgttgtgagttggatagttgtggaaagagtcaaatggctctcctcaagcgtattcaacaaggggctgaaggatgcccagaaggtaccccattgtatgggatctgatctggggcctcggtgcacatgctttacatgtgtttagtcgaggttaaaaaaacgtctaggccccccgaaccacggggacgtggttttcctttgaaaaacacgatgataatatggccacaaccatggtgagcaagggcgaggagctgttcaccggggtggtgcccatcctggtcgagctggacggcgacgtaaacggccacaagttcagcgtgtccggcgagggcgagggcgatgccacctacggcaagctgaccctgaagttcatctgcaccaccggcaagctgcccgtgccctggcccaccctcgtgaccaccctgacctacggcgtgcagtgcttcagccgctaccccgaccacatgaagcagcacgacttcttcaagtccgccatgcccgaaggctacgtccaggagcgcaccatcttcttcaaggacgacggcaactacaagacccgcgccgaggtgaagttcgagggcgacaccctggtgaaccgcatcgagctgaagggcatcgacttcaaggaggacggcaacatcctggggcacaagctggagtacaactacaacagccacaacgtctatatcatggccgacaagcagaagaacggcatcaaggtgaacttcaagatccgccacaacatcgaggacggcagcgtgcagctcgccgaccactaccagcagaacacccccatcggcgacggccccgtgctgctgcccgacaaccactacctgagcacccagtccgccctgagcaaagaccccaacgagaagcgcgatcacatggtcctgctggagttcgtgaccgccgccgggatcactctcggcatggacgagctgtacaagtaaagcggccgcgactctagatcataatcagccataccacatttgtagaggttttacttgctttaaaaaacctcccacacctccccctgaacctgaaacataaaatgaatgcaattgttgttgttaacttgtttattgcagcttataatggttacaaataaagcaatagcatcacaaatttcacaaataaagcatttttttcactgcattctagttgtggtttgtccaaactcatcaatgtatcttaaggcgtaaattgtaagcgttaatattttgttaaaattcgcgttaaatttttgttaaatcagctcattttttaaccaataggccgaaatcggcaaaatcccttataaatcaaaagaatagaccgagatagggttgagtgttgttccagtttggaacaagagtccactattaaagaacgtggactccaacgtcaaagggcgaaaaaccgtctatcagggcgatggcccactacgtgaaccatcaccctaatcaagttttttggggtcgaggtgccgtaaagcactaaatcggaaccctaaagggagcccccgatttagagcttgacggggaaagccggcgaacgtggcgagaaaggaagggaagaaagcgaaaggagcgggcgctagggcgctggcaagtgtagcggtcacgctgcgcgtaaccaccacacccgccgcgcttaatgcgccgctacagggcgcgtcaggtggcacttttcggggaaatgtgcgcggaacccctatttgtttatttttctaaatacattcaaatatgtatccgctcatgagacaataaccctgataaatgcttcaataatattgaaaaaggaagagtcctgaggcggaaagaaccagctgtggaatgtgtgtcagttagggtgtggaaagtccccaggctccccagcaggcagaagtatgcaaagcatgcatctcaattagtcagcaaccaggtgtggaaagtccccaggctccccagcaggcagaagtatgcaaagcatgcatctcaattagtcagcaaccatagtcccgcccctaactccgcccatcccgcccctaactccgcccagttccgcccattctccgccccatggctgactaattttttttatttatgcagaggccgaggccgcctcggcctctgagctattccagaagtagtgaggaggcttttttggaggcctaggcttttgcaaagatcgatcaagagacaggatgaggatcgtttcgcatgattgaacaagatggattgcacgcaggttctccggccgcttgggtggagaggctattcggctatgactgggcacaacagacaatcggctgctctgatgccgccgtgttccggctgtcagcgcaggggcgcccggttctttttgtcaagaccgacctgtccggtgccctgaatgaactgcaagacgaggcagcgcggctatcgtggctggccacgacgggcgttccttgcgcagctgtgctcgacgttgtcactgaagcgggaagggactggctgctattgggcgaagtgccggggcaggatctcctgtcatctcaccttgctcctgccgagaaagtatccatcatggctgatgcaatgcggcggctgcatacgcttgatccggctacctgcccattcgaccaccaagcgaaacatcgcatcgagcgagcacgtactcggatggaagccggtcttgtcgatcaggatgatctggacgaagagcatcaggggctcgcgccagccgaactgttcgccaggctcaaggcgagcatgcccgacggcgaggatctcgtcgtgacccatggcgatgcctgcttgccgaatatcatggtggaaaatggccgcttttctggattcatcgactgtggccggctgggtgtggcggaccgctatcaggacatagcgttggctacccgtgatattgctgaagagcttggcggcgaatgggctgaccgcttcctcgtgctttacggtatcgccgctcccgattcgcagcgcatcgccttctatcgccttcttgacgagttcttctgagcgggactctggggttcgaaatgaccgaccaagcgacgcccaacctgccatcacgagatttcgattccaccgccgccttctatgaaaggttgggcttcggaatcgttttccgggacgccggctggatgatcctccagcgcggggatctcatgctggagttcttcgcccaccctagggggaggctaactgaaacacggaaggagacaataccggaaggaacccgcgctatgacggcaataaaaagacagaataaaacgcacggtgttgggtcgtttgttcataaacgcggggttcggtcccagggctggcactctgtcgataccccaccgagaccccattggggccaatacgcccgcgtttcttccttttccccaccccaccccccaagttcgggtgaaggcccagggctcgcagccaacgtcggggcggcaggccctgccatagcctcaggttactcatatatactttagattgatttaaaacttcatttttaatttaaaaggatctaggtgaagatcctttttgataatctcatgaccaaaatcccttaacgtgagttttcgttccactgagcgtcagaccccgtagaaaagatcaaaggatcttcttgagatcctttttttctgcgcgtaatctgctgcttgcaaacaaaaaaaccaccgctaccagcggtggtttgtttgccggatcaagagctaccaactctttttccgaaggtaactggcttcagcagagcgcagataccaaatactgtccttctagtgtagccgtagttaggccaccacttcaagaactctgtagcaccgcctacatacctcgctctgctaatcctgttaccagtggctgctgccagtggcgataagtcgtgtcttaccgggttggactcaagacgatagttaccggataaggcgcagcggtcgggctgaacggggggttcgtgcacacagcccagcttggagcgaacgacctacaccgaactgagatacctacagcgtgagctatgagaaagcgccacgcttcccgaagggagaaaggcggacaggtatccggtaagcggcagggtcggaacaggagagcgcacgagggagcttccagggggaaacgcctggtatctttatagtcctgtcgggtttcgccacctctgacttgagcgtcgatttttgtgatgctcgtcaggggggcggagcctatggaaaaacgccagcaacgcggcctttttacggttcctggccttttgctggccttttgctcacatgttctttcctgcgttatcccctgattctgtggataaccgtattaccgccatgcat

SEQ ID NO: 697 - DNA, 7381 bp, Artificial Sequence
  pC-T(ss)-I-zGFP
tagttattaatagtaatcaattacggggtcattagttcatagcccatatatggagttccgcgttacataacttacggtaaatggcccgcctggctgaccgcccaacgacccccgcccattgacgtcaataatgacgtatgttcccatagtaacgccaatagggactttccattgacgtcaatgggtggagtatttacggtaaactgcccacttggcagtacatcaagtgtatcatatgccaagtacgccccctattgacgtcaatgacggtaaatggcccgcctggcattatgcccagtacatgaccttatgggactttcctacttggcagtacatctacgtattagtcatcgctattaccatggtgatgcggttttggcagtacatcaatgggcgtggatagcggtttgactcacggggatttccaagtctccaccccattgacgtcaatgggagtttgttttggcaccaaaatcaacgggactttccaaaatgtcgtaacaactccgccccattgacgcaaatgggcggtaggcgtgtacggtgggaggtctatataagcagagctggtttagtgaaccgtcagatccgctagcacaaccatggacaaagtgctgaatagggaggaaagtctgcaactgatggatctgttgggacttgagaggtctgcatggggtaatatcccacttatgaggaaagcatacctgaagaagtgtaaagagttccatcctgacaaaggtggagatgaagagaagatgaaaaagatgaacacactgtataagaaaatggaagatggtgtaaagtatgctcaccagccagattttggaggtttttgggatgccacagagatacctacttatggtacagatgagtgggaacagtggtggaatgcatttaatgaagagaatttgttttgctctgaggaaatgcctagttctgatgatgaggccacagctgactcccagcacagtactccacccaagaaaaagagaaaagtggaagacccaaaggatttcccctctgaactcttgtccttcttgtctcatgcagtgttctcaaataggaccctggcttgctttgctatctacactactaaggagaaggcagctctcttgtacaagaaaatcatggaaaagtattctgtcacctttatttccaggcacaactcctataatcataatattctctttttcttgacaccccataggcatagggtgagtgcaattaacaactatgctcagaagttgtgtactttctccttcctgatctgtaagggtgtgaataaggagtatctcatgtattcagccctgaccagagacccctttagtgtgattgaagaatccctgcctggtgggctcaaggagcatgatttcaacccagaagaggctgaagaaacaaaacaggtgagctggaagcttgtgactgaatatgcaatggagacaaagtgtgatgatgtcctgctcctcctgggaatgtacctggaatttcagtatagctttgaaatgtgtctgaaatgtatcaaaaaggaacagccttctcattataagtatcatgaaaagcactatgccaatgcagctatatttgcagattctaaaaaccagaaaaccatttgtcagcaagctgttgacacagttctggccaagaaaagagtagactctctccagcttaccagggagcagatgttgacaaataggttcaatgaccttctggacagaatggacataatgtttggctcaactggatctgcagatatagaggagtggatggctggagtggcctggctgcactgtctcctccctaaaatggacagtgtagtctatgacttccttaagtgtatggtctataatatccctaaaaagagatactggttgttcaagggacccattgattcagggaaaactacccttgctgctgcacttctggaactctgtggtgggaaagctctcaatgtcaacctgccacttgatagactcaactttgagctgggggtggcaattgatcagtttttggtagtgtttgaagatgtgaaaggtacaggaggagagtccagggatttgcctagtggccaaggcatcaacaatctggacaacctcagagactacctggatgggtctgtaaaggtcaaccttgaaaaaaagcatctcaacaagaggactcaaatatttccacctggaatagtcactatgaatgaatattcagtgcccaagaccctccaggctagatttgtcaagcaaattgatttcagacctaaagattatctgaaacattgtttggagaggagtgagttcctccttgagaaaaggattattcagtcaggaatagcactgcttcttatgctgatatggtatagaccagtggctgagtttgcccaaagcattcagagtagaatagttgagtggaaagaaaggcttgacaaggagttttctctttcagtatatcaaaagatgaagttcaatgtggctatgggtattggagtgcttgattggttgagaaacagtgatgatgatgatgaagattctcaggaaaatgctgataaaaatgaggatgggggagagaagaatatggaagattctggtcatgaaactggcattgatagtcagagccaggggagtttccaggctccacagagctcccaaagtgtccatgaccacaaccagccttaccatatatgcagaggttttacttgtttcaagaaacctcccactccccctccagaacctgaaacatgaggatccgcccctctccctcccccccccctaacgttactggccgaagccgcttggaataaggccggtgtgcgtttgtctatatgttattttccaccatattgccgtcttttggcaatgtgagggcccggaaacctggccctgtcttcttgacgagcattcctaggggtctttcccctctcgccaaaggaatgcaaggtctgttgaatgtcgtgaaggaagcagttcctctggaagcttcttgaagacaaacaacgtctgtagcgaccctttgcaggcagcggaaccccccacctggcgacaggtgcctctgcggccaaaagccacgtgtataagatacacctgcaaaggcggcacaaccccagtgccacgttgtgagttggatagttgtggaaagagtcaaatggctctcctcaagcgtattcaacaaggggctgaaggatgcccagaaggtaccccattgtatgggatctgatctggggcctcggtgcacatgctttacatgtgtttagtcgaggttaaaaaaacgtctaggccccccgaaccacggggacgtggttttcctttgaaaaacacgatgataatatggccacaaccatggtgagcaagggagaggaactctttacaggtgtggtcccaattctggtggagctggatggagatgtgaatgggcacaaattttctgtcagtggagagggagagggggatgctacctatggcaaactgactctgaagttcatctgcactactggcaagctgcctgtgccatggccaactctggtgacaaccctcacctatggagtccagtgcttttccagatatcctgaccacatgaaacagcatgactttttcaaatctgcaatgcctgagggctatgtgcaagagagaactatctttttcaaggatgatgggaactataagactagggctgaggtgaaatttgaaggagacaccctggtcaataggattgagctcaaggggattgacttcaaggaggatggcaacattctgggccataagctggagtataattacaattcccacaatgtctacattatggctgacaagcagaagaatggcattaaggtcaacttcaagattagacacaacatagaggatggatctgtgcagctggctgaccattaccagcagaatacacctattggggatgggccagtgctgctccctgacaatcactatctgagcacccaatctgctttgtctaaagatcctaatgaaaagagagatcacatggtgctgctggagtttgtaactgctgcaggaattaccttgggtatggatgaactctataagtaagtaagcggccgcgactctagatcataatcagccataccacatttgtagaggttttacttgctttaaaaaacctcccacacctccccctgaacctgaaacataaaatgaatgcaattgttgttgttaacttgtttattgcagcttataatggttacaaataaagcaatagcatcacaaatttcacaaataaagcatttttttcactgcattctagttgtggtttgtccaaactcatcaatgtatcttaaggcgtaaattgtaagcgttaatattttgttaaaattcgcgttaaatttttgttaaatcagctcattttttaaccaataggccgaaatcggcaaaatcccttataaatcaaaagaatagaccgagatagggttgagtgttgttccagtttggaacaagagtccactattaaagaacgtggactccaacgtcaaagggcgaaaaaccgtctatcagggcgatggcccactacgtgaaccatcaccctaatcaagttttttggggtcgaggtgccgtaaagcactaaatcggaaccctaaagggagcccccgatttagagcttgacggggaaagccggcgaacgtggcgagaaaggaagggaagaaagcgaaaggagcgggcgctagggcgctggcaagtgtagcggtcacgctgcgcgtaaccaccacacccgccgcgcttaatgcgccgctacagggcgcgtcaggtggcacttttcggggaaatgtgcgcggaacccctatttgtttatttttctaaatacattcaaatatgtatccgctcatgagacaataaccctgataaatgcttcaataatattgaaaaaggaagagtcctgaggcggaaagaaccagctgtggaatgtgtgtcagttagggtgtggaaagtccccaggctccccagcaggcagaagtatgcaaagcatgcatctcaattagtcagcaaccaggtgtggaaagtccccaggctccccagcaggcagaagtatgcaaagcatgcatctcaattagtcagcaaccatagtcccgcccctaactccgcccatcccgcccctaactccgcccagttccgcccattctccgccccatggctgactaattttttttatttatgcagaggccgaggccgcctcggcctctgagctattccagaagtagtgaggaggcttttttggaggcctaggcttttgcaaagatcgatcaagagacaggatgaggatcgtttcgcatgattgaacaagatggattgcacgcaggttctccggccgcttgggtggagaggctattcggctatgactgggcacaacagacaatcggctgctctgatgccgccgtgttccggctgtcagcgcaggggcgcccggttctttttgtcaagaccgacctgtccggtgccctgaatgaactgcaagacgaggcagcgcggctatcgtggctggccacgacgggcgttccttgcgcagctgtgctcgacgttgtcactgaagcgggaagggactggctgctattgggcgaagtgccggggcaggatctcctgtcatctcaccttgctcctgccgagaaagtatccatcatggctgatgcaatgcggcggctgcatacgcttgatccggctacctgcccattcgaccaccaagcgaaacatcgcatcgagcgagcacgtactcggatggaagccggtcttgtcgatcaggatgatctggacgaagagcatcaggggctcgcgccagccgaactgttcgccaggctcaaggcgagcatgcccgacggcgaggatctcgtcgtgacccatggcgatgcctgcttgccgaatatcatggtggaaaatggccgcttttctggattcatcgactgtggccggctgggtgtggcggaccgctatcaggacatagcgttggctacccgtgatattgctgaagagcttggcggcgaatgggctgaccgcttcctcgtgctttacggtatcgccgctcccgattcgcagcgcatcgccttctatcgccttcttgacgagttcttctgagcgggactctggggttcgaaatgaccgaccaagcgacgcccaacctgccatcacgagatttcgattccaccgccgccttctatgaaaggttgggcttcggaatcgttttccgggacgccggctggatgatcctccagcgcggggatctcatgctggagttcttcgcccaccctagggggaggctaactgaaacacggaaggagacaataccggaaggaacccgcgctatgacggcaataaaaagacagaataaaacgcacggtgttgggtcgtttgttcataaacgcggggttcggtcccagggctggcactctgtcgataccccaccgagaccccattggggccaatacgcccgcgtttcttccttttccccaccccaccccccaagttcgggtgaaggcccagggctcgcagccaacgtcggggcggcaggccctgccatagcctcaggttactcatatatactttagattgatttaaaacttcatttttaatttaaaaggatctaggtgaagatcctttttgataatctcatgaccaaaatcccttaacgtgagttttcgttccactgagcgtcagaccccgtagaaaagatcaaaggatcttcttgagatcctttttttctgcgcgtaatctgctgcttgcaaacaaaaaaaccaccgctaccagcggtggtttgtttgccggatcaagagctaccaactctttttccgaaggtaactggcttcagcagagcgcagataccaaatactgtccttctagtgtagccgtagttaggccaccacttcaagaactctgtagcaccgcctacatacctcgctctgctaatcctgttaccagtggctgctgccagtggcgataagtcgtgtcttaccgggttggactcaagacgatagttaccggataaggcgcagcggtcgggctgaacggggggttcgtgcacacagcccagcttggagcgaacgacctacaccgaactgagatacctacagcgtgagctatgagaaagcgccacgcttcccgaagggagaaaggcggacaggtatccggtaagcggcagggtcggaacaggagagcgcacgagggagcttccagggggaaacgcctggtatctttatagtcctgtcgggtttcgccacctctgacttgagcgtcgatttttgtgatgctcgtcaggggggcggagcctatggaaaaacgccagcaacgcggcctttttacggttcctggccttttgctggccttttgctcacatgttctttcctgcgttatcccctgattctgtggataaccgtattaccgccatgcat

SEQ ID NO: 698 - DNA, 6627 bp, Artificial Sequence
  pC-I-T (pIRES2-SV40TAg wt)
ttcctattaatagtaatcaattacggggtcattagttcatagcccatatatggagttccgcgttacataacttacggtaaatggcccgcctggctgaccgcccaacgacccccgcccattgacgtcaataatgacgtatgttcccatagtaacgccaatagggactttccattgacgtcaatgggtggagtatttacggtaaactgcccacttggcagtacatcaagtgtatcatatgccaagtacgccccctattgacgtcaatgacggtaaatggcccgcctggcattatgcccagtacatgaccttatgggactttcctacttggcagtacatctacgtattagtcatcgctattaccatggtgatgcggttttggcagtacatcaatgggcgtggatagcggtttgactcacggggatttccaagtctccaccccattgacgtcaatgggagtttgttttggcaccaaaatcaacgggactttccaaaatgtcgtaacaactccgccccattgacgcaaatgggcggtaggcgtgtacggtgggaggtctatataagcagagctggtttagtgaaccgtcagatccgctagcgctaccggactcagatctcgagctcaagcttcgaattctgcagtcgacggtaccgcgggcccgggatccgcccctctccctcccccccccctaacgttactggccgaagccgcttggaataaggccggtgtgcgtttgtctatatgttattttccaccatattgccgtcttttggcaatgtgagggcccggaaacctggccctgtcttcttgacgagcattcctaggggtctttcccctctcgccaaaggaatgcaaggtctgttgaatgtcgtgaaggaagcagttcctctggaagcttcttgaagacaaacaacgtctgtagcgaccctttgcaggcagcggaaccccccacctggcgacaggtgcctctgcggccaaaagccacgtgtataagatacacctgcaaaggcggcacaaccccagtgccacgttgtgagttggatagttgtggaaagagtcaaatggctctcctcaagcgtattcaacaaggggctgaaggatgcccagaaggtaccccattgtatgggatctgatctggggcctcggtgcacatgctttacatgtgtttagtcgaggttaaaaaaacgtctaggccccccgaaccacggggacgtggttttcctttgaaaaacacgatgataatatggccacaaccatggacaaagtgctgaatagggaggaaagtctgcaactgatggatctgttgggacttgagaggtctgcatggggtaatatcccacttatgaggaaagcatacctgaagaagtgtaaagagttccatcctgacaaaggtggagatgaagagaagatgaaaaagatgaacacactgtataagaaaatggaagatggtgtaaagtatgctcaccagccagattttggaggtttttgggatgccacagagatacctacttatggtacagatgagtgggaacagtggtggaatgcatttaatgaagagaatttgttttgctctgaggaaatgcctagttctgatgatgaggccacagctgactcccagcacagtactccacccaagaaaaagagaaaagtggaagacccaaaggatttcccctctgaactcttgtccttcttgtctcatgcagtgttctcaaataggaccctggcttgctttgctatctacactactaaggagaaggcagctctcttgtacaagaaaatcatggaaaagtattctgtcacctttatttccaggcacaactcctataatcataatattctctttttcttgacaccccataggcatagggtgagtgcaattaacaactatgctcagaagttgtgtactttctccttcctgatctgtaagggtgtgaataaggagtatctcatgtattcagccctgaccagagacccctttagtgtgattgaagaatccctgcctggtgggctcaaggagcatgatttcaacccagaagaggctgaagaaacaaaacaggtgagctggaagcttgtgactgaatatgcaatggagacaaagtgtgatgatgtcctgctcctcctgggaatgtacctggaatttcagtatagctttgaaatgtgtctgaaatgtatcaaaaaggaacagccttctcattataagtatcatgaaaagcactatgccaatgcagctatatttgcagattctaaaaaccagaaaaccatttgtcagcaagctgttgacacagttctggccaagaaaagagtagactctctccagcttaccagggagcagatgttgacaaataggttcaatgaccttctggacagaatggacataatgtttggctcaactggatctgcagatatagaggagtggatggctggagtggcctggctgcactgtctcctccctaaaatggacagtgtagtctatgacttccttaagtgtatggtctataatatccctaaaaagagatactggttgttcaagggacccattgattcagggaaaactacccttgctgctgcacttctggaactctgtggtgggaaagctctcaatgtcaacctgccacttgatagactcaactttgagctgggggtggcaattgatcagtttttggtagtgtttgaagatgtgaaaggtacaggaggagagtccagggatttgcctagtggccaaggcatcaacaatctggacaacctcagagactacctggatgggtctgtaaaggtcaaccttgaaaaaaagcatctcaacaagaggactcaaatatttccacctggaatagtcactatgaatgaatattcagtgcccaagaccctccaggctagatttgtcaagcaaattgatttcagacctaaagattatctgaaacattgtttggagaggagtgagttcctccttgagaaaaggattattcagtcaggaatagcactgcttcttatgctgatatggtatagaccagtggctgagtttgcccaaagcattcagagtagaatagttgagtggaaagaaaggcttgacaaggagttttctctttcagtatatcaaaagatgaagttcaatgtggctatgggtattggagtgcttgattggttgagaaacagtgatgatgatgatgaagattctcaggaaaatgctgataaaaatgaggatgggggagagaagaatatggaagattctggtcatgaaactggcattgatagtcagagccaggggagtttccaggctccacagagctcccaaagtgtccatgaccacaaccagccttaccatatatgcagaggttttacttgtttcaagaaacctcccactccccctccagaacctgaaacatgagcggccgcgactctagatcataatcagccataccacatttgtagaggttttacttgctttaaaaaacctcccacacctccccctgaacctgaaacataaaatgaatgcaattgttgttgttaacttgtttattgcagcttataatggttacaaataaagcaatagcatcacaaatttcacaaataaagcatttttttcactgcattctagttgtggtttgtccaaactcatcaatgtatcttaaggcgtaaattgtaagcgttaatattttgttaaaattcgcgttaaatttttgttaaatcagctcattttttaaccaataggccgaaatcggcaaaatcccttataaatcaaaagaatagaccgagatagggttgagtgttgttccagtttggaacaagagtccactattaaagaacgtggactccaacgtcaaagggcgaaaaaccgtctatcagggcgatggcccactacgtgaaccatcaccctaatcaagttttttggggtcgaggtgccgtaaagcactaaatcggaaccctaaagggagcccccgatttagagcttgacggggaaagccggcgaacgtggcgagaaaggaagggaagaaagcgaaaggagcgggcgctagggcgctggcaagtgtagcggtcacgctgcgcgtaaccaccacacccgccgcgcttaatgcgccgctacagggcgcgtcaggtggcacttttcggggaaatgtgcgcggaacccctatttgtttatttttctaaatacattcaaatatgtatccgctcatgagacaataaccctgataaatgcttcaataatattgaaaaaggaagagtcctgaggcggaaagaaccagctgtggaatgtgtgtcagttagggtgtggaaagtccccaggctccccagcaggcagaagtatgcaaagcatgcatctcaattagtcagcaaccaggtgtggaaagtccccaggctccccagcaggcagaagtatgcaaagcatgcatctcaattagtcagcaaccatagtcccgcccctaactccgcccatcccgcccctaactccgcccagttccgcccattctccgccccatggctgactaattttttttatttatgcagaggccgaggccgcctcggcctctgagctattccagaagtagtgaggaggcttttttggaggcctaggcttttgcaaagatcgatcaagagacaggatgaggatcgtttcgcatgattgaacaagatggattgcacgcaggttctccggccgcttgggtggagaggctattcggctatgactgggcacaacagacaatcggctgctctgatgccgccgtgttccggctgtcagcgcaggggcgcccggttctttttgtcaagaccgacctgtccggtgccctgaatgaactgcaagacgaggcagcgcggctatcgtggctggccacgacgggcgttccttgcgcagctgtgctcgacgttgtcactgaagcgggaagggactggctgctattgggcgaagtgccggggcaggatctcctgtcatctcaccttgctcctgccgagaaagtatccatcatggctgatgcaatgcggcggctgcatacgcttgatccggctacctgcccattcgaccaccaagcgaaacatcgcatcgagcgagcacgtactcggatggaagccggtcttgtcgatcaggatgatctggacgaagagcatcaggggctcgcgccagccgaactgttcgccaggctcaaggcgagcatgcccgacggcgaggatctcgtcgtgacccatggcgatgcctgcttgccgaatatcatggtggaaaatggccgcttttctggattcatcgactgtggccggctgggtgtggcggaccgctatcaggacatagcgttggctacccgtgatattgctgaagagcttggcggcgaatgggctgaccgcttcctcgtgctttacggtatcgccgctcccgattcgcagcgcatcgccttctatcgccttcttgacgagttcttctgagcgggactctggggttcgaaatgaccgaccaagcgacgcccaacctgccatcacgagatttcgattccaccgccgccttctatgaaaggttgggcttcggaatcgttttccgggacgccggctggatgatcctccagcgcggggatctcatgctggagttcttcgcccaccctagggggaggctaactgaaacacggaaggagacaataccggaaggaacccgcgctatgacggcaataaaaagacagaataaaacgcacggtgttgggtcgtttgttcataaacgcggggttcggtcccagggctggcactctgtcgataccccaccgagaccccattggggccaatacgcccgcgtttcttccttttccccaccccaccccccaagttcgggtgaaggcccagggctcgcagccaacgtcggggcggcaggccctgccatagcctcaggttactcatatatactttagattgatttaaaacttcatttttaatttaaaaggatctaggtgaagatcctttttgataatctcatgaccaaaatcccttaacgtgagttttcgttccactgagcgtcagaccccgtagaaaagatcaaaggatcttcttgagatcctttttttctgcgcgtaatctgctgcttgcaaacaaaaaaaccaccgctaccagcggtggtttgtttgccggatcaagagctaccaactctttttccgaaggtaactggcttcagcagagcgcagataccaaatactgtccttctagtgtagccgtagttaggccaccacttcaagaactctgtagcaccgcctacatacctcgctctgctaatcctgttaccagtggctgctgccagtggcgataagtcgtgtcttaccgggttggactcaagacgatagttaccggataaggcgcagcggtcgggctgaacggggggttcgtgcacacagcccagcttggagcgaacgacctacaccgaactgagatacctacagcgtgagctatgagaaagcgccacgcttcccgaagggagaaaggcggacaggtatccggtaagcggcagggtcggaacaggagagcgcacgagggagcttccagggggaaacgcctggtatctttatagtcctgtcgggtttcgccacctctgacttgagcgtcgatttttgtgatgctcgtcaggggggcggagcctatggaaaaacgccagcaacgcggcctttttacgg

SEQ ID NO: 699 - DNA, 7377 bp, Artificial Sequence
  pCzGFP-I-T
  CDS (603)...(1319): zGFP
tagttattaatagtaatcaattacggggtcattagttcatagcccatatatggagttccgcgttacataacttacggtaaatggcccgcctggctgaccgcccaacgacccccgcccattgacgtcaataatgacgtatgttcccatagtaacgccaatagggactttccattgacgtcaatgggtggagtatttacggtaaactgcccacttggcagtacatcaagtgtatcatatgccaagtacgccccctattgacgtcaatgacggtaaatggcccgcctggcattatgcccagtacatgaccttatgggactttcctacttggcagtacatctacgtattagtcatcgctattaccatggtgatgcggttttggcagtacatcaatgggcgtggatagcggtttgactcacggggatttccaagtctccaccccattgacgtcaatgggagtttgttttggcaccaaaatcaacgggactttccaaaatgtcgtaacaactccgccccattgacgcaaatgggcggtaggcgtgtacggtgggaggtctatataagcagagctggtttagtgaaccgtcagatccgctagctagaccatggtgagcaagggagaggaactctttacaggtgtggtcccaattctggtggagctggatggagatgtgaatgggcacaaattttctgtcagtggagagggagagggggatgctacctatggcaaactgactctgaagttcatctgcactactggcaagctgcctgtgccatggccaactctggtgacaaccctcacctatggagtccagtgcttttccagatatcctgaccacatgaaacagcatgactttttcaaatctgcaatgcctgagggctatgtgcaagagagaactatctttttcaaggatgatgggaactataagactagggctgaggtgaaatttgaaggagacaccctggtcaataggattgagctcaaggggattgacttcaaggaggatggcaacattctgggccataagctggagtataattacaattcccacaatgtctacattatggctgacaagcagaagaatggcattaaggtcaacttcaagattagacacaacatagaggatggatctgtgcagctggctgaccattaccagcagaatacacctattggggatgggccagtgctgctccctgacaatcactatctgagcacccaatctgctttgtctaaagatcctaatgaaaagagagatcacatggtgctgctggagtttgtaactgctgcaggaattaccttgggtatggatgaactctataagtaaggatccgcccctctccctcccccccccctaacgttactggccgaagccgcttggaataaggccggtgtgcgtttgtctatatgttattttccaccatattgccgtcttttggcaatgtgagggcccggaaacctggccctgtcttcttgacgagcattcctaggggtctttcccctctcgccaaaggaatgcaaggtctgttgaatgtcgtgaaggaagcagttcctctggaagcttcttgaagacaaacaacgtctgtagcgaccctttgcaggcagcggaaccccccacctggcgacaggtgcctctgcggccaaaagccacgtgtataagatacacctgcaaaggcggcacaaccccagtgccacgttgtgagttggatagttgtggaaagagtcaaatggctctcctcaagcgtattcaacaaggggctgaaggatgcccagaaggtaccccattgtatgggatctgatctggggcctcggtgcacatgctttacatgtgtttagtcgaggttaaaaaaacgtctaggccccccgaaccacggggacgtggttttcctttgaaaaacacgatgataatatggccacaaccatggacaaagtgctgaatagggaggaaagtctgcaactgatggatctgttgggacttgagaggtctgcatggggtaatatcccacttatgaggaaagcatacctgaagaagtgtaaagagttccatcctgacaaaggtggagatgaagagaagatgaaaaagatgaacacactgtataagaaaatggaagatggtgtaaagtatgctcaccagccagattttggaggtttttgggatgccacagagatacctacttatggtacagatgagtgggaacagtggtggaatgcatttaatgaagagaatttgttttgctctgaggaaatgcctagttctgatgatgaggccacagctgactcccagcacagtactccacccaagaaaaagagaaaagtggaagacccaaaggatttcccctctgaactcttgtccttcttgtctcatgcagtgttctcaaataggaccctggcttgctttgctatctacactactaaggagaaggcagctctcttgtacaagaaaatcatggaaaagtattctgtcacctttatttccaggcacaactcctataatcataatattctctttttcttgacaccccataggcatagggtgagtgcaattaacaactatgctcagaagttgtgtactttctccttcctgatctgtaagggtgtgaataaggagtatctcatgtattcagccctgaccagagacccctttagtgtgattgaagaatccctgcctggtgggctcaaggagcatgatttcaacccagaagaggctgaagaaacaaaacaggtgagctggaagcttgtgactgaatatgcaatggagacaaagtgtgatgatgtcctgctcctcctgggaatgtacctggaatttcagtatagctttgaaatgtgtctgaaatgtatcaaaaaggaacagccttctcattataagtatcatgaaaagcactatgccaatgcagctatatttgcagattctaaaaaccagaaaaccatttgtcagcaagctgttgacacagttctggccaagaaaagagtagactctctccagcttaccagggagcagatgttgacaaataggttcaatgaccttctggacagaatggacataatgtttggctcaactggatctgcagatatagaggagtggatggctggagtggcctggctgcactgtctcctccctaaaatggacagtgtagtctatgacttccttaagtgtatggtctataatatccctaaaaagagatactggttgttcaagggacccattgattcagggaaaactacccttgctgctgcacttctggaactctgtggtgggaaagctctcaatgtcaacctgccacttgatagactcaactttgagctgggggtggcaattgatcagtttttggtagtgtttgaagatgtgaaaggtacaggaggagagtccagggatttgcctagtggccaaggcatcaacaatctggacaacctcagagactacctggatgggtctgtaaaggtcaaccttgaaaaaaagcatctcaacaagaggactcaaatatttccacctggaatagtcactatgaatgaatattcagtgcccaagaccctccaggctagatttgtcaagcaaattgatttcagacctaaagattatctgaaacattgtttggagaggagtgagttcctccttgagaaaaggattattcagtcaggaatagcactgcttcttatgctgatatggtatagaccagtggctgagtttgcccaaagcattcagagtagaatagttgagtggaaagaaaggcttgacaaggagttttctctttcagtatatcaaaagatgaagttcaatgtggctatgggtattggagtgcttgattggttgagaaacagtgatgatgatgatgaagattctcaggaaaatgctgataaaaatgaggatgggggagagaagaatatggaagattctggtcatgaaactggcattgatagtcagagccaggggagtttccaggctccacagagctcccaaagtgtccatgaccacaaccagccttaccatatatgcagaggttttacttgtttcaagaaacctcccactccccctccagaacctgaaacatgagcggccgcgactctagatcataatcagccataccacatttgtagaggttttacttgctttaaaaaacctcccacacctccccctgaacctgaaacataaaatgaatgcaattgttgttgttaacttgtttattgcagcttataatggttacaaataaagcaatagcatcacaaatttcacaaataaagcatttttttcactgcattctagttgtggtttgtccaaactcatcaatgtatcttaaggcgtaaattgtaagcgttaatattttgttaaaattcgcgttaaatttttgttaaatcagctcattttttaaccaataggccgaaatcggcaaaatcccttataaatcaaaagaatagaccgagatagggttgagtgttgttccagtttggaacaagagtccactattaaagaacgtggactccaacgtcaaagggcgaaaaaccgtctatcagggcgatggcccactacgtgaaccatcaccctaatcaagttttttggggtcgaggtgccgtaaagcactaaatcggaaccctaaagggagcccccgatttagagcttgacggggaaagccggcgaacgtggcgagaaaggaagggaagaaagcgaaaggagcgggcgctagggcgctggcaagtgtagcggtcacgctgcgcgtaaccaccacacccgccgcgcttaatgcgccgctacagggcgcgtcaggtggcacttttcggggaaatgtgcgcggaacccctatttgtttatttttctaaatacattcaaatatgtatccgctcatgagacaataaccctgataaatgcttcaataatattgaaaaaggaagagtcctgaggcggaaagaaccagctgtggaatgtgtgtcagttagggtgtggaaagtccccaggctccccagcaggcagaagtatgcaaagcatgcatctcaattagtcagcaaccaggtgtggaaagtccccaggctccccagcaggcagaagtatgcaaagcatgcatctcaattagtcagcaaccatagtcccgcccctaactccgcccatcccgcccctaactccgcccagttccgcccattctccgccccatggctgactaattttttttatttatgcagaggccgaggccgcctcggcctctgagctattccagaagtagtgaggaggcttttttggaggcctaggcttttgcaaagatcgatcaagagacaggatgaggatcgtttcgcatgattgaacaagatggattgcacgcaggttctccggccgcttgggtggagaggctattcggctatgactgggcacaacagacaatcggctgctctgatgccgccgtgttccggctgtcagcgcaggggcgcccggttctttttgtcaagaccgacctgtccggtgccctgaatgaactgcaagacgaggcagcgcggctatcgtggctggccacgacgggcgttccttgcgcagctgtgctcgacgttgtcactgaagcgggaagggactggctgctattgggcgaagtgccggggcaggatctcctgtcatctcaccttgctcctgccgagaaagtatccatcatggctgatgcaatgcggcggctgcatacgcttgatccggctacctgcccattcgaccaccaagcgaaacatcgcatcgagcgagcacgtactcggatggaagccggtcttgtcgatcaggatgatctggacgaagagcatcaggggctcgcgccagccgaactgttcgccaggctcaaggcgagcatgcccgacggcgaggatctcgtcgtgacccatggcgatgcctgcttgccgaatatcatggtggaaaatggccgcttttctggattcatcgactgtggccggctgggtgtggcggaccgctatcaggacatagcgttggctacccgtgatattgctgaagagcttggcggcgaatgggctgaccgcttcctcgtgctttacggtatcgccgctcccgattcgcagcgcatcgccttctatcgccttcttgacgagttcttctgagcgggactctggggttcgaaatgaccgaccaagcgacgcccaacctgccatcacgagatttcgattccaccgccgccttctatgaaaggttgggcttcggaatcgttttccgggacgccggctggatgatcctccagcgcggggatctcatgctggagttcttcgcccaccctagggggaggctaactgaaacacggaaggagacaataccggaaggaacccgcgctatgacggcaataaaaagacagaataaaacgcacggtgttgggtcgtttgttcataaacgcggggttcggtcccagggctggcactctgtcgataccccaccgagaccccattggggccaatacgcccgcgtttcttccttttccccaccccaccccccaagttcgggtgaaggcccagggctcgcagccaacgtcggggcggcaggccctgccatagcctcaggttactcatatatactttagattgatttaaaacttcatttttaatttaaaaggatctaggtgaagatcctttttgataatctcatgaccaaaatcccttaacgtgagttttcgttccactgagcgtcagaccccgtagaaaagatcaaaggatcttcttgagatcctttttttctgcgcgtaatctgctgcttgcaaacaaaaaaaccaccgctaccagcggtggtttgtttgccggatcaagagctaccaactctttttccgaaggtaactggcttcagcagagcgcagataccaaatactgtccttctagtgtagccgtagttaggccaccacttcaagaactctgtagcaccgcctacatacctcgctctgctaatcctgttaccagtggctgctgccagtggcgataagtcgtgtcttaccgggttggactcaagacgatagttaccggataaggcgcagcggtcgggctgaacggggggttcgtgcacacagcccagcttggagcgaacgacctacaccgaactgagatacctacagcgtgagctatgagaaagcgccacgcttcccgaagggagaaaggcggacaggtatccggtaagcggcagggtcggaacaggagagcgcacgagggagcttccagggggaaacgcctggtatctttatagtcctgtcgggtttcgccacctctgacttgagcgtcgatttttgtgatgctcgtcaggggggcggagcctatggaaaaacgccagcaacgcggcctttttacggttcctggccttttgctggccttttgctcacatgttctttcctgcgttatcccctgattctgtggataaccgtattaccgccatgcat

SEQ ID NO: 700 - DNA, 8247 bp, Artificial Sequence
  pCzSV5F-I-T
  CDS (603)...(2189): SV5F
tagttattaatagtaatcaattacggggtcattagttcatagcccatatatggagttccgcgttacataacttacggtaaatggcccgcctggctgaccgcccaacgacccccgcccattgacgtcaataatgacgtatgttcccatagtaacgccaatagggactttccattgacgtcaatgggtggagtatttacggtaaactgcccacttggcagtacatcaagtgtatcatatgccaagtacgccccctattgacgtcaatgacggtaaatggcccgcctggcattatgcccagtacatgaccttatgggactttcctacttggcagtacatctacgtattagtcatcgctattaccatggtgatgcggttttggcagtacatcaatgggcgtggatagcggtttgactcacggggatttccaagtctccaccccattgacgtcaatgggagtttgttttggcaccaaaatcaacgggactttccaaaatgtcgtaacaactccgccccattgacgcaaatgggcggtaggcgtgtacggtgggaggtctatataagcagagctggtttagtgaaccgtcagatccgctagctagaccatggggactattattcaatttctggtggtcagctgtctgctggctggggcaggatctctggaccctgctgccctcatgcagattggggtgattcctaccaatgtcaggcagctcatgtattatacagaagcttcttctgcctttattgttgtgaagctgatgcctactatagacagtcccatctctggctgtaacattacttcaataagttcctataatgcaactgtgactaagctgctccagcccataggggaaaatctggaaactataagaaaccagctgattcctacaagaaggagaaggagatttgctggagttgtgattgggctggctgccctgggtgtggctacagcagcacaagtgacagctgcagtggccctggtcaaagcaaatgagaatgcagctgccatcctgaatctcaagaatgccatccagaagactaatgctgcagttgctgatgtggtgcaagccacacaatctctgggcacagcagtgcaagcagtgcaggatcatatcaactctgttgtgagcccagcaattacagctgccaactgtaaagcacaagatgccatcattggtagcatactcaatctgtatctgactgagctgaccacaatctttcacaaccagattaccaacccagccctgtctccaattaccatccaggccctcaggatactgctgggctctacactgcccactgtggttgaaaagagctttaatacccagatcagtgcagctgagctgctgtcttctggactcctgacagggcagattgttgggctggacctcacctacatgcagatggttatcaagattgaactgcctacactgactgttcagcctgccactcagattattgatctggcaacaatttcagcctttatcaataaccaggaagtgatggctcagctcccaacaagggttatggtgactggcagtctgatacaggcataccctgccagccagtgcaccataacacccaatacagtgtattgcaggtacaatgatgcccaggtgctgtctgatgacacaatggcctgcctgcaggggaatctgactaggtgcacttttagtccagtggtgggcagctttctgactaggtttgtgctgtttgatggcatagtctatgccaactgcaggtccatgctctgcaaatgcatgcagcctgcagcagttattctgcagccaagtagcagtccagtgacagtgatagacatgtataagtgtgtttctctgcaactggacaacctgaggttcaccatcactcagctggcaaatgttacttacaactcaactattaaactggagtcaagtcagattctgagcattgaccctctggatatctcccagaatctggctgcagtgaataagagcctcagtgatgcactccaacatctggcccagtcagacacctatctctcagccattacctctgcaactaccacctcagtcctgagcattatagctatatgtctgggatcactgggcctgattctgatcatactgctgagtgttgtggtgtggaagctgctgacaattgtggtggccaacaggaataggatggaaaattttgtgtaccacaaatagggatccgcccctctccctcccccccccctaacgttactggccgaagccgcttggaataaggccggtgtgcgtttgtctatatgttattttccaccatattgccgtcttttggcaatgtgagggcccggaaacctggccctgtcttcttgacgagcattcctaggggtctttcccctctcgccaaaggaatgcaaggtctgttgaatgtcgtgaaggaagcagttcctctggaagcttcttgaagacaaacaacgtctgtagcgaccctttgcaggcagcggaaccccccacctggcgacaggtgcctctgcggccaaaagccacgtgtataagatacacctgcaaaggcggcacaaccccagtgccacgttgtgagttggatagttgtggaaagagtcaaatggctctcctcaagcgtattcaacaaggggctgaaggatgcccagaaggtaccccattgtatgggatctgatctggggcctcggtgcacatgctttacatgtgtttagtcgaggttaaaaaaacgtctaggccccccgaaccacggggacgtggttttcctttgaaaaacacgatgataatatggccacaaccatggacaaagtgctgaatagggaggaaagtctgcaactgatggatctgttgggacttgagaggtctgcatggggtaatatcccacttatgaggaaagcatacctgaagaagtgtaaagagttccatcctgacaaaggtggagatgaagagaagatgaaaaagatgaacacactgtataagaaaatggaagatggtgtaaagtatgctcaccagccagattttggaggtttttgggatgccacagagatacctacttatggtacagatgagtgggaacagtggtggaatgcatttaatgaagagaatttgttttgctctgaggaaatgcctagttctgatgatgaggccacagctgactcccagcacagtactccacccaagaaaaagagaaaagtggaagacccaaaggatttcccctctgaactcttgtccttcttgtctcatgcagtgttctcaaataggaccctggcttgctttgctatctacactactaaggagaaggcagctctcttgtacaagaaaatcatggaaaagtattctgtcacctttatttccaggcacaactcctataatcataatattctctttttcttgacaccccataggcatagggtgagtgcaattaacaactatgctcagaagttgtgtactttctccttcctgatctgtaagggtgtgaataaggagtatctcatgtattcagccctgaccagagacccctttagtgtgattgaagaatccctgcctggtgggctcaaggagcatgatttcaacccagaagaggctgaagaaacaaaacaggtgagctggaagcttgtgactgaatatgcaatggagacaaagtgtgatgatgtcctgctcctcctgggaatgtacctggaatttcagtatagctttgaaatgtgtctgaaatgtatcaaaaaggaacagccttctcattataagtatcatgaaaagcactatgccaatgcagctatatttgcagattctaaaaaccagaaaaccatttgtcagcaagctgttgacacagttctggccaagaaaagagtagactctctccagcttaccagggagcagatgttgacaaataggttcaatgaccttctggacagaatggacataatgtttggctcaactggatctgcagatatagaggagtggatggctggagtggcctggctgcactgtctcctccctaaaatggacagtgtagtctatgacttccttaagtgtatggtctataatatccctaaaaagagatactggttgttcaagggacccattgattcagggaaaactacccttgctgctgcacttctggaactctgtggtgggaaagctctcaatgtcaacctgccacttgatagactcaactttgagctgggggtggcaattgatcagtttttggtagtgtttgaagatgtgaaaggtacaggaggagagtccagggatttgcctagtggccaaggcatcaacaatctggacaacctcagagactacctggatgggtctgtaaaggtcaaccttgaaaaaaagcatctcaacaagaggactcaaatatttccacctggaatagtcactatgaatgaatattcagtgcccaagaccctccaggctagatttgtcaagcaaattgatttcagacctaaagattatctgaaacattgtttggagaggagtgagttcctccttgagaaaaggattattcagtcaggaatagcactgcttcttatgctgatatggtatagaccagtggctgagtttgcccaaagcattcagagtagaatagttgagtggaaagaaaggcttgacaaggagttttctctttcagtatatcaaaagatgaagttcaatgtggctatgggtattggagtgcttgattggttgagaaacagtgatgatgatgatgaagattctcaggaaaatgctgataaaaatgaggatgggggagagaagaatatggaagattctggtcatgaaactggcattgatagtcagagccaggggagtttccaggctccacagagctcccaaagtgtccatgaccacaaccagccttaccatatatgcagaggttttacttgtttcaagaaacctcccactccccctccagaacctgaaacatgagcggccgcgactctagatcataatcagccataccacatttgtagaggttttacttgctttaaaaaacctcccacacctccccctgaacctgaaacataaaatgaatgcaattgttgttgttaacttgtttattgcagcttataatggttacaaataaagcaatagcatcacaaatttcacaaataaagcatttttttcactgcattctagttgtggtttgtccaaactcatcaatgtatcttaaggcgtaaattgtaagcgttaatattttgttaaaattcgcgttaaatttttgttaaatcagctcattttttaaccaataggccgaaatcggcaaaatcccttataaatcaaaagaatagaccgagatagggttgagtgttgttccagtttggaacaagagtccactattaaagaacgtggactccaacgtcaaagggcgaaaaaccgtctatcagggcgatggcccactacgtgaaccatcaccctaatcaagttttttggggtcgaggtgccgtaaagcactaaatcggaaccctaaagggagcccccgatttagagcttgacggggaaagccggcgaacgtggcgagaaaggaagggaagaaagcgaaaggagcgggcgctagggcgctggcaagtgtagcggtcacgctgcgcgtaaccaccacacccgccgcgcttaatgcgccgctacagggcgcgtcaggtggcacttttcggggaaatgtgcgcggaacccctatttgtttatttttctaaatacattcaaatatgtatccgctcatgagacaataaccctgataaatgcttcaataatattgaaaaaggaagagtcctgaggcggaaagaaccagctgtggaatgtgtgtcagttagggtgtggaaagtccccaggctccccagcaggcagaagtatgcaaagcatgcatctcaattagtcagcaaccaggtgtggaaagtccccaggctccccagcaggcagaagtatgcaaagcatgcatctcaattagtcagcaaccatagtcccgcccctaactccgcccatcccgcccctaactccgcccagttccgcccattctccgccccatggctgactaattttttttatttatgcagaggccgaggccgcctcggcctctgagctattccagaagtagtgaggaggcttttttggaggcctaggcttttgcaaagatcgatcaagagacaggatgaggatcgtttcgcatgattgaacaagatggattgcacgcaggttctccggccgcttgggtggagaggctattcggctatgactgggcacaacagacaatcggctgctctgatgccgccgtgttccggctgtcagcgcaggggcgcccggttctttttgtcaagaccgacctgtccggtgccctgaatgaactgcaagacgaggcagcgcggctatcgtggctggccacgacgggcgttccttgcgcagctgtgctcgacgttgtcactgaagcgggaagggactggctgctattgggcgaagtgccggggcaggatctcctgtcatctcaccttgctcctgccgagaaagtatccatcatggctgatgcaatgcggcggctgcatacgcttgatccggctacctgcccattcgaccaccaagcgaaacatcgcatcgagcgagcacgtactcggatggaagccggtcttgtcgatcaggatgatctggacgaagagcatcaggggctcgcgccagccgaactgttcgccaggctcaaggcgagcatgcccgacggcgaggatctcgtcgtgacccatggcgatgcctgcttgccgaatatcatggtggaaaatggccgcttttctggattcatcgactgtggccggctgggtgtggcggaccgctatcaggacatagcgttggctacccgtgatattgctgaagagcttggcggcgaatgggctgaccgcttcctcgtgctttacggtatcgccgctcccgattcgcagcgcatcgccttctatcgccttcttgacgagttcttctgagcgggactctggggttcgaaatgaccgaccaagcgacgcccaacctgccatcacgagatttcgattccaccgccgccttctatgaaaggttgggcttcggaatcgttttccgggacgccggctggatgatcctccagcgcggggatctcatgctggagttcttcgcccaccctagggggaggctaactgaaacacggaaggagacaataccggaaggaacccgcgctatgacggcaataaaaagacagaataaaacgcacggtgttgggtcgtttgttcataaacgcggggttcggtcccagggctggcactctgtcgataccccaccgagaccccattggggccaatacgcccgcgtttcttccttttccccaccccaccccccaagttcgggtgaaggcccagggctcgcagccaacgtcggggcggcaggccctgccatagcctcaggttactcatatatactttagattgatttaaaacttcatttttaatttaaaaggatctaggtgaagatcctttttgataatctcatgaccaaaatcccttaacgtgagttttcgttccactgagcgtcagaccccgtagaaaagatcaaaggatcttcttgagatcctttttttctgcgcgtaatctgctgcttgcaaacaaaaaaaccaccgctaccagcggtggtttgtttgccggatcaagagctaccaactctttttccgaaggtaactggcttcagcagagcgcagataccaaatactgtccttctagtgtagccgtagttaggccaccacttcaagaactctgtagcaccgcctacatacctcgctctgctaatcctgttaccagtggctgctgccagtggcgataagtcgtgtcttaccgggttggactcaagacgatagttaccggataaggcgcagcggtcgggctgaacggggggttcgtgcacacagcccagcttggagcgaacgacctacaccgaactgagatacctacagcgtgagctatgagaaagcgccacgcttcccgaagggagaaaggcggacaggtatccggtaagcggcagggtcggaacaggagagcgcacgagggagcttccagggggaaacgcctggtatctttatagtcctgtcgggtttcgccacctctgacttgagcgtcgatttttgtgatgctcgtcaggggggcggagcctatggaaaaacgccagcaacgcggcctttttacggttcctggccttttgctggccttttgctcacatgttctttcctgcgttatcccctgattctgtggataaccgtattaccgccatgcat

SEQ ID NO: 701 - DNA, 7685 bp, Artificial Sequence
  pCzVSVG-I-T
  CDS (603)...(1628): VSV-G
tagttattaatagtaatcaattacggggtcattagttcatagcccatatatggagttccgcgttacataacttacggtaaatggcccgcctggctgaccgcccaacgacccccgcccattgacgtcaataatgacgtatgttcccatagtaacgccaatagggactttccattgacgtcaatgggtggagtatttacggtaaactgcccacttggcagtacatcaagtgtatcatatgccaagtacgccccctattgacgtcaatgacggtaaatggcccgcctggcattatgcccagtacatgaccttatgggactttcctacttggcagtacatctacgtattagtcatcgctattaccatggtgatgcggttttggcagtacatcaatgggcgtggatagcggtttgactcacggggatttccaagtctccaccccattgacgtcaatgggagtttgttttggcaccaaaatcaacgggactttccaaaatgtcgtaacaactccgccccattgacgcaaatgggcggtaggcgtgtacggtgggaggtctatataagcagagctggtttagtgaaccgtcagatccgctagctagaccatgaaatgctatgctggggtaaactgcaagacagtccataacaaggggaattggaaaaatgtgtccaattaccattattgttcatcctctgataattggcacaatgatggcacagctgtgaaaatgaagtcccacaaggctgcagatggatggatgtgtcatgccagcaagtgggttaccacttgtgacaggtggtatgggaaatacacccattctaggtccacctctgtgtgtaagtctacaaagggtacttggaatggctcctgtggatatgccacagtaactgatgctgcagtggttgtgacccaccatgtggttgactacactggttgggtggactccaatggtaagtgtagcaactactgtactgttcataacagtaccacttggcattcagattataaagtcaaggggtgtgattcaaactccatggacacctctgatggttcaagtggaaaaggaacaggcagatctaactatgcttatactggtggtaaggcatgtaagatgtactgtaaacattggggagttaggtctggagtgtggatggcagataaggatgctgcagccaggtgtggtagtagttctgccagcacttctgttgatgtgtctgatgtgagagattactcatgcacttggagtaagagggcaggtagtgtagatagttatgcaaaaaatggcactggggccacaaatggcacaaaatataccagatacagggtggatgcagcctctaggatggtgggtatgagtgggaccaccactaggtgggatgactgggcatatgatgttgggaatggagtgagaacatcatcaggctacaaatacatgggacatggtatggatagtgatcatagttcaaaggctgtgcaccatgatgctgcatctgatgactcaggagacactgggagtaagaatgttggttggtcttcttggaaatctagtgcatctgggggtgttagagtaggacactgcaagaaacatactaaaaagaggtatactgacattgagatgaatagagggaaatgaggatccgcccctctccctcccccccccctaacgttactggccgaagccgcttggaataaggccggtgtgcgtttgtctatatgttattttccaccatattgccgtcttttggcaatgtgagggcccggaaacctggccctgtcttcttgacgagcattcctaggggtctttcccctctcgccaaaggaatgcaaggtctgttgaatgtcgtgaaggaagcagttcctctggaagcttcttgaagacaaacaacgtctgtagcgaccctttgcaggcagcggaaccccccacctggcgacaggtgcctctgcggccaaaagccacgtgtataagatacacctgcaaaggcggcacaaccccagtgccacgttgtgagttggatagttgtggaaagagtcaaatggctctcctcaagcgtattcaacaaggggctgaaggatgcccagaaggtaccccattgtatgggatctgatctggggcctcggtgcacatgctttacatgtgtttagtcgaggttaaaaaaacgtctaggccccccgaaccacggggacgtggttttcctttgaaaaacacgatgataatatggccacaaccatggacaaagtgctgaatagggaggaaagtctgcaactgatggatctgttgggacttgagaggtctgcatggggtaatatcccacttatgaggaaagcatacctgaagaagtgtaaagagttccatcctgacaaaggtggagatgaagagaagatgaaaaagatgaacacactgtataagaaaatggaagatggtgtaaagtatgctcaccagccagattttggaggtttttgggatgccacagagatacctacttatggtacagatgagtgggaacagtggtggaatgcatttaatgaagagaatttgttttgctctgaggaaatgcctagttctgatgatgaggccacagctgactcccagcacagtactccacccaagaaaaagagaaaagtggaagacccaaaggatttcccctctgaactcttgtccttcttgtctcatgcagtgttctcaaataggaccctggcttgctttgctatctacactactaaggagaaggcagctctcttgtacaagaaaatcatggaaaagtattctgtcacctttatttccaggcacaactcctataatcataatattctctttttcttgacaccccataggcatagggtgagtgcaattaacaactatgctcagaagttgtgtactttctccttcctgatctgtaagggtgtgaataaggagtatctcatgtattcagccctgaccagagacccctttagtgtgattgaagaatccctgcctggtgggctcaaggagcatgatttcaacccagaagaggctgaagaaacaaaacaggtgagctggaagcttgtgactgaatatgcaatggagacaaagtgtgatgatgtcctgctcctcctgggaatgtacctggaatttcagtatagctttgaaatgtgtctgaaatgtatcaaaaaggaacagccttctcattataagtatcatgaaaagcactatgccaatgcagctatatttgcagattctaaaaaccagaaaaccatttgtcagcaagctgttgacacagttctggccaagaaaagagtagactctctccagcttaccagggagcagatgttgacaaataggttcaatgaccttctggacagaatggacataatgtttggctcaactggatctgcagatatagaggagtggatggctggagtggcctggctgcactgtctcctccctaaaatggacagtgtagtctatgacttccttaagtgtatggtctataatatccctaaaaagagatactggttgttcaagggacccattgattcagggaaaactacccttgctgctgcacttctggaactctgtggtgggaaagctctcaatgtcaacctgccacttgatagactcaactttgagctgggggtggcaattgatcagtttttggtagtgtttgaagatgtgaaaggtacaggaggagagtccagggatttgcctagtggccaaggcatcaacaatctggacaacctcagagactacctggatgggtctgtaaaggtcaaccttgaaaaaaagcatctcaacaagaggactcaaatatttccacctggaatagtcactatgaatgaatattcagtgcccaagaccctccaggctagatttgtcaagcaaattgatttcagacctaaagattatctgaaacattgtttggagaggagtgagttcctccttgagaaaaggattattcagtcaggaatagcactgcttcttatgctgatatggtatagaccagtggctgagtttgcccaaagcattcagagtagaatagttgagtggaaagaaaggcttgacaaggagttttctctttcagtatatcaaaagatgaagttcaatgtggctatgggtattggagtgcttgattggttgagaaacagtgatgatgatgatgaagattctcaggaaaatgctgataaaaatgaggatgggggagagaagaatatggaagattctggtcatgaaactggcattgatagtcagagccaggggagtttccaggctccacagagctcccaaagtgtccatgaccacaaccagccttaccatatatgcagaggttttacttgtttcaagaaacctcccactccccctccagaacctgaaacatgagcggccgcgactctagatcataatcagccataccacatttgtagaggttttacttgctttaaaaaacctcccacacctccccctgaacctgaaacataaaatgaatgcaattgttgttgttaacttgtttattgcagcttataatggttacaaataaagcaatagcatcacaaatttcacaaataaagcatttttttcactgcattctagttgtggtttgtccaaactcatcaatgtatcttaaggcgtaaattgtaagcgttaatattttgttaaaattcgcgttaaatttttgttaaatcagctcattttttaaccaataggccgaaatcggcaaaatcccttataaatcaaaagaatagaccgagatagggttgagtgttgttccagtttggaacaagagtccactattaaagaacgtggactccaacgtcaaagggcgaaaaaccgtctatcagggcgatggcccactacgtgaaccatcaccctaatcaagttttttggggtcgaggtgccgtaaagcactaaatcggaaccctaaagggagcccccgatttagagcttgacggggaaagccggcgaacgtggcgagaaaggaagggaagaaagcgaaaggagcgggcgctagggcgctggcaagtgtagcggtcacgctgcgcgtaaccaccacacccgccgcgcttaatgcgccgctacagggcgcgtcaggtggcacttttcggggaaatgtgcgcggaacccctatttgtttatttttctaaatacattcaaatatgtatccgctcatgagacaataaccctgataaatgcttcaataatattgaaaaaggaagagtcctgaggcggaaagaaccagctgtggaatgtgtgtcagttagggtgtggaaagtccccaggctccccagcaggcagaagtatgcaaagcatgcatctcaattagtcagcaaccaggtgtggaaagtccccaggctccccagcaggcagaagtatgcaaagcatgcatctcaattagtcagcaaccatagtcccgcccctaactccgcccatcccgcccctaactccgcccagttccgcccattctccgccccatggctgactaattttttttatttatgcagaggccgaggccgcctcggcctctgagctattccagaagtagtgaggaggcttttttggaggcctaggcttttgcaaagatcgatcaagagacaggatgaggatcgtttcgcatgattgaacaagatggattgcacgcaggttctccggccgcttgggtggagaggctattcggctatgactgggcacaacagacaatcggctgctctgatgccgccgtgttccggctgtcagcgcaggggcgcccggttctttttgtcaagaccgacctgtccggtgccctgaatgaactgcaagacgaggcagcgcggctatcgtggctggccacgacgggcgttccttgcgcagctgtgctcgacgttgtcactgaagcgggaagggactggctgctattgggcgaagtgccggggcaggatctcctgtcatctcaccttgctcctgccgagaaagtatccatcatggctgatgcaatgcggcggctgcatacgcttgatccggctacctgcccattcgaccaccaagcgaaacatcgcatcgagcgagcacgtactcggatggaagccggtcttgtcgatcaggatgatctggacgaagagcatcaggggctcgcgccagccgaactgttcgccaggctcaaggcgagcatgcccgacggcgaggatctcgtcgtgacccatggcgatgcctgcttgccgaatatcatggtggaaaatggccgcttttctggattcatcgactgtggccggctgggtgtggcggaccgctatcaggacatagcgttggctacccgtgatattgctgaagagcttggcggcgaatgggctgaccgcttcctcgtgctttacggtatcgccgctcccgattcgcagcgcatcgccttctatcgccttcttgacgagttcttctgagcgggactctggggttcgaaatgaccgaccaagcgacgcccaacctgccatcacgagatttcgattccaccgccgccttctatgaaaggttgggcttcggaatcgttttccgggacgccggctggatgatcctccagcgcggggatctcatgctggagttcttcgcccaccctagggggaggctaactgaaacacggaaggagacaataccggaaggaacccgcgctatgacggcaataaaaagacagaataaaacgcacggtgttgggtcgtttgttcataaacgcggggttcggtcccagggctggcactctgtcgataccccaccgagaccccattggggccaatacgcccgcgtttcttccttttccccaccccaccccccaagttcgggtgaaggcccagggctcgcagccaacgtcggggcggcaggccctgccatagcctcaggttactcatatatactttagattgatttaaaacttcatttttaatttaaaaggatctaggtgaagatcctttttgataatctcatgaccaaaatcccttaacgtgagttttcgttccactgagcgtcagaccccgtagaaaagatcaaaggatcttcttgagatcctttttttctgcgcgtaatctgctgcttgcaaacaaaaaaaccaccgctaccagcggtggtttgtttgccggatcaagagctaccaactctttttccgaaggtaactggcttcagcagagcgcagataccaaatactgtccttctagtgtagccgtagttaggccaccacttcaagaactctgtagcaccgcctacatacctcgctctgctaatcctgttaccagtggctgctgccagtggcgataagtcgtgtcttaccgggttggactcaagacgatagttaccggataaggcgcagcggtcgggctgaacggggggttcgtgcacacagcccagcttggagcgaacgacctacaccgaactgagatacctacagcgtgagctatgagaaagcgccacgcttcccgaagggagaaaggcggacaggtatccggtaagcggcagggtcggaacaggagagcgcacgagggagcttccagggggaaacgcctggtatctttatagtcctgtcgggtttcgccacctctgacttgagcgtcgatttttgtgatgctcgtcaggggggcggagcctatggaaaaacgccagcaacgcggcctttttacggttccggccttttgctggccttttgctcacatgttctttcctgcgttatcccctgattctgtggataaccgtattaccgccatgcat

SEQ ID NO: 702 - DNA, 6954 bp, Artificial Sequence
  pCzARVp10-I-T
  CDS (603)...(896): ARVp10
tagttattaatagtaatcaattacggggtcattagttcatagcccatatatggagttccgcgttacataacttacggtaaatggcccgcctggctgaccgcccaacgacccccgcccattgacgtcaataatgacgtatgttcccatagtaacgccaatagggactttccattgacgtcaatgggtggagtatttacggtaaactgcccacttggcagtacatcaagtgtatcatatgccaagtacgccccctattgacgtcaatgacggtaaatggcccgcctggcattatgcccagtacatgaccttatgggactttcctacttggcagtacatctacgtattagtcatcgctattaccatggtgatgcggttttggcagtacatcaatgggcgtggatagcggtttgactcacggggatttccaagtctccaccccattgacgtcaatgggagtttgttttggcaccaaaatcaacgggactttccaaaatgtcgtaacaactccgccccattgacgcaaatgggcggtaggcgtgtacggtgggaggtctatataagcagagctggtttagtgaaccgtcagatccgctagctagaccatgctcagaatgcctccaggaagttgtaatggtgctacagctgtgtttggaaatgttcactgtcaagcagctcagaatactgctggtggggatctgcaggccacttcatccatcattgcatactggccttacctggcagctggaggtggctttctcctgatagtcattatttttgccctgctgtactgttgcaaggccaaaatcaaagcagatgctgccagaagtgtcttccacagggagctggtggctctcagctctggcaagcacaatgctatggctcctccatatgatgtttaaggatccgcccctctccctcccccccccctaacgttactggccgaagccgcttggaataaggccggtgtgcgtttgtctatatgttattttccaccatattgccgtcttttggcaatgtgagggcccggaaacctggccctgtcttcttgacgagcattcctaggggtctttcccctctcgccaaaggaatgcaaggtctgttgaatgtcgtgaaggaagcagttcctctggaagcttcttgaagacaaacaacgtctgtagcgaccctttgcaggcagcggaaccccccacctggcgacaggtgcctctgcggccaaaagccacgtgtataagatacacctgcaaaggcggcacaaccccagtgccacgttgtgagttggatagttgtggaaagagtcaaatggctctcctcaagcgtattcaacaaggggctgaaggatgcccagaaggtaccccattgtatgggatctgatctggggcctcggtgcacatgctttacatgtgtttagtcgaggttaaaaaaacgtctaggccccccgaaccacggggacgtggttttcctttgaaaaacacgatgataatatggccacaaccatggacaaagtgctgaatagggaggaaagtctgcaactgatggatctgttgggacttgagaggtctgcatggggtaatatcccacttatgaggaaagcatacctgaagaagtgtaaagagttccatcctgacaaaggtggagatgaagagaagatgaaaaagatgaacacactgtataagaaaatggaagatggtgtaaagtatgctcaccagccagattttggaggtttttgggatgccacagagatacctacttatggtacagatgagtgggaacagtggtggaatgcatttaatgaagagaatttgttttgctctgaggaaatgcctagttctgatgatgaggccacagctgactcccagcacagtactccacccaagaaaaagagaaaagtggaagacccaaaggatttcccctctgaactcttgtccttcttgtctcatgcagtgttctcaaataggaccctggcttgctttgctatctacactactaaggagaaggcagctctcttgtacaagaaaatcatggaaaagtattctgtcacctttatttccaggcacaactcctataatcataatattctctttttcttgacaccccataggcatagggtgagtgcaattaacaactatgctcagaagttgtgtactttctccttcctgatctgtaagggtgtgaataaggagtatctcatgtattcagccctgaccagagacccctttagtgtgattgaagaatccctgcctggtgggctcaaggagcatgatttcaacccagaagaggctgaagaaacaaaacaggtgagctggaagcttgtgactgaatatgcaatggagacaaagtgtgatgatgtcctgctcctcctgggaatgtacctggaatttcagtatagctttgaaatgtgtctgaaatgtatcaaaaaggaacagccttctcattataagtatcatgaaaagcactatgccaatgcagctatatttgcagattctaaaaaccagaaaaccatttgtcagcaagctgttgacacagttctggccaagaaaagagtagactctctccagcttaccagggagcagatgttgacaaataggttcaatgaccttctggacagaatggacataatgtttggctcaactggatctgcagatatagaggagtggatggctggagtggcctggctgcactgtctcctccctaaaatggacagtgtagtctatgacttccttaagtgtatggtctataatatccctaaaaagagatactggttgttcaagggacccattgattcagggaaaactacccttgctgctgcacttctggaactctgtggtgggaaagctctcaatgtcaacctgccacttgatagactcaactttgagctgggggtggcaattgatcagtttttggtagtgtttgaagatgtgaaaggtacaggaggagagtccagggatttgcctagtggccaaggcatcaacaatctggacaacctcagagactacctggatgggtctgtaaaggtcaaccttgaaaaaaagcatctcaacaagaggactcaaatatttccacctggaatagtcactatgaatgaatattcagtgcccaagaccctccaggctagatttgtcaagcaaattgatttcagacctaaagattatctgaaacattgtttggagaggagtgagttcctccttgagaaaaggattattcagtcaggaatagcactgcttcttatgctgatatggtatagaccagtggctgagtttgcccaaagcattcagagtagaatagttgagtggaaagaaaggcttgacaaggagttttctctttcagtatatcaaaagatgaagttcaatgtggctatgggtattggagtgcttgattggttgagaaacagtgatgatgatgatgaagattctcaggaaaatgctgataaaaatgaggatgggggagagaagaatatggaagattctggtcatgaaactggcattgatagtcagagccaggggagtttccaggctccacagagctcccaaagtgtccatgaccacaaccagccttaccatatatgcagaggttttacttgtttcaagaaacctcccactccccctccagaacctgaaacatgagcggccgcgactctagatcataatcagccataccacatttgtagaggttttacttgctttaaaaaacctcccacacctccccctgaacctgaaacataaaatgaatgcaattgttgttgttaacttgtttattgcagcttataatggttacaaataaagcaatagcatcacaaatttcacaaataaagcatttttttcactgcattctagttgtggtttgtccaaactcatcaatgtatcttaaggcgtaaattgtaagcgttaatattttgttaaaattcgcgttaaatttttgttaaatcagctcattttttaaccaataggccgaaatcggcaaaatcccttataaatcaaaagaatagaccgagatagggttgagtgttgttccagtttggaacaagagtccactattaaagaacgtggactccaacgtcaaagggcgaaaaaccgtctatcagggcgatggcccactacgtgaaccatcaccctaatcaagttttttggggtcgaggtgccgtaaagcactaaatcggaaccctaaagggagcccccgatttagagcttgacggggaaagccggcgaacgtggcgagaaaggaagggaagaaagcgaaaggagcgggcgctagggcgctggcaagtgtagcggtcacgctgcgcgtaaccaccacacccgccgcgcttaatgcgccgctacagggcgcgtcaggtggcacttttcggggaaatgtgcgcggaacccctatttgtttatttttctaaatacattcaaatatgtatccgctcatgagacaataaccctgataaatgcttcaataatattgaaaaaggaagagtcctgaggcggaaagaaccagctgtggaatgtgtgtcagttagggtgtggaaagtccccaggctccccagcaggcagaagtatgcaaagcatgcatctcaattagtcagcaaccaggtgtggaaagtccccaggctccccagcaggcagaagtatgcaaagcatgcatctcaattagtcagcaaccatagtcccgcccctaactccgcccatcccgcccctaactccgcccagttccgcccattctccgccccatggctgactaattttttttatttatgcagaggccgaggccgcctcggcctctgagctattccagaagtagtgaggaggcttttttggaggcctaggcttttgcaaagatcgatcaagagacaggatgaggatcgtttcgcatgattgaacaagatggattgcacgcaggttctccggccgcttgggtggagaggctattcggctatgactgggcacaacagacaatcggctgctctgatgccgccgtgttccggctgtcagcgcaggggcgcccggttctttttgtcaagaccgacctgtccggtgccctgaatgaactgcaagacgaggcagcgcggctatcgtggctggccacgacgggcgttccttgcgcagctgtgctcgacgttgtcactgaagcgggaagggactggctgctattgggcgaagtgccggggcaggatctcctgtcatctcaccttgctcctgccgagaaagtatccatcatggctgatgcaatgcggcggctgcatacgcttgatccggctacctgcccattcgaccaccaagcgaaacatcgcatcgagcgagcacgtactcggatggaagccggtcttgtcgatcaggatgatctggacgaagagcatcaggggctcgcgccagccgaactgttcgccaggctcaaggcgagcatgcccgacggcgaggatctcgtcgtgacccatggcgatgcctgcttgccgaatatcatggtggaaaatggccgcttttctggattcatcgactgtggccggctgggtgtggcggaccgctatcaggacatagcgttggctacccgtgatattgctgaagagcttggcggcgaatgggctgaccgcttcctcgtgctttacggtatcgccgctcccgattcgcagcgcatcgccttctatcgccttcttgacgagttcttctgagcgggactctggggttcgaaatgaccgaccaagcgacgcccaacctgccatcacgagatttcgattccaccgccgccttctatgaaaggttgggcttcggaatcgttttccgggacgccggctggatgatcctccagcgcggggatctcatgctggagttcttcgcccaccctagggggaggctaactgaaacacggaaggagacaataccggaaggaacccgcgctatgacggcaataaaaagacagaataaaacgcacggtgttgggtcgtttgttcataaacgcggggttcggtcccagggctggcactctgtcgataccccaccgagaccccattggggccaatacgcccgcgtttcttccttttccccaccccaccccccaagttcgggtgaaggcccagggctcgcagccaacgtcggggcggcaggccctgccatagcctcaggttactcatatatactttagattgatttaaaacttcatttttaatttaaaaggatctaggtgaagatcctttttgataatctcatgaccaaaatcccttaacgtgagttttcgttccactgagcgtcagaccccgtagaaaagatcaaaggatcttcttgagatcctttttttctgcgcgtaatctgctgcttgcaaacaaaaaaaccaccgctaccagcggtggtttgtttgccggatcaagagctaccaactctttttccgaaggtaactggcttcagcagagcgcagataccaaatactgtccttctagtgtagccgtagttaggccaccacttcaagaactctgtagcaccgcctacatacctcgctctgctaatcctgttaccagtggctgctgccagtggcgataagtcgtgtcttaccgggttggactcaagacgatagttaccggataaggcgcagcggtcgggctgaacggggggttcgtgcacacagcccagcttggagcgaacgacctacaccgaactgagatacctacagcgtgagctatgagaaagcgccacgcttcccgaagggagaaaggcggacaggtatccggtaagcggcagggtcggaacaggagagcgcacgagggagcttccagggggaaacgcctggtatctttatagtcctgtcgggtttcgccacctctgacttgagcgtcgatttttgtgatgctcgtcaggggggcggagcctatggaaaaacgccagcaacgcggcctttttacggttcctggccttttgctggccttttgctcacatgttctttcctgcgttatcccctgattctgtggataaccgtattaccgccatgcat

SEQ ID NO: 703 - DNA, 7035 bp, Artificial Sequence
  pCzRRVp14-I-T
  CDS (603)...(977): RRVp14
tagttattaatagtaatcaattacggggtcattagttcatagcccatatatggagttccgcgttacataacttacggtaaatggcccgcctggctgaccgcccaacgacccccgcccattgacgtcaataatgacgtatgttcccatagtaacgccaatagggactttccattgacgtcaatgggtggagtatttacggtaaactgcccacttggcagtacatcaagtgtatcatatgccaagtacgccccctattgacgtcaatgacggtaaatggcccgcctggcattatgcccagtacatgaccttatgggactttcctacttggcagtacatctacgtattagtcatcgctattaccatggtgatgcggttttggcagtacatcaatgggcgtggatagcggtttgactcacggggatttccaagtctccaccccattgacgtcaatgggagtttgttttggcaccaaaatcaacgggactttccaaaatgtcgtaacaactccgccccattgacgcaaatgggcggtaggcgtgtacggtgggaggtctatataagcagagctggtttagtgaaccgtcagatccgctagctagaccatgggatctgggccatctaattttgttaatcatgcacctggggaagccattgtgactgggctggagaagggagcagataaagttgctgggaccatcagccacactatttgggaggtcattgcaggcttggtggctcttttgaccttcctggcatttggcttctggctgttcaagtacctgcagaagaggagagaaagaaggagacagctcacagaattccagaagaggtatctgagaaattcctacagattgtcagaaattcaaaggccaatttctcagcatgagtatgaagacccctatgagcctccatccagaaggaaacctccccctccaccttactccacttatgtgaatattgacaatgtatctgccatataaggatccgcccctctccctcccccccccctaacgttactggccgaagccgcttggaataaggccggtgtgcgtttgtctatatgttattttccaccatattgccgtcttttggcaatgtgagggcccggaaacctggccctgtcttcttgacgagcattcctaggggtctttcccctctcgccaaaggaatgcaaggtctgttgaatgtcgtgaaggaagcagttcctctggaagcttcttgaagacaaacaacgtctgtagcgaccctttgcaggcagcggaaccccccacctggcgacaggtgcctctgcggccaaaagccacgtgtataagatacacctgcaaaggcggcacaaccccagtgccacgttgtgagttggatagttgtggaaagagtcaaatggctctcctcaagcgtattcaacaaggggctgaaggatgcccagaaggtaccccattgtatgggatctgatctggggcctcggtgcacatgctttacatgtgtttagtcgaggttaaaaaaacgtctaggccccccgaaccacggggacgtggttttcctttgaaaaacacgatgataatatggccacaaccatggacaaagtgctgaatagggaggaaagtctgcaactgatggatctgttgggacttgagaggtctgcatggggtaatatcccacttatgaggaaagcatacctgaagaagtgtaaagagttccatcctgacaaaggtggagatgaagagaagatgaaaaagatgaacacactgtataagaaaatggaagatggtgtaaagtatgctcaccagccagattttggaggtttttgggatgccacagagatacctacttatggtacagatgagtgggaacagtggtggaatgcatttaatgaagagaatttgttttgctctgaggaaatgcctagttctgatgatgaggccacagctgactcccagcacagtactccacccaagaaaaagagaaaagtggaagacccaaaggatttcccctctgaactcttgtccttcttgtctcatgcagtgttctcaaataggaccctggcttgctttgctatctacactactaaggagaaggcagctctcttgtacaagaaaatcatggaaaagtattctgtcacctttatttccaggcacaactcctataatcataatattctctttttcttgacaccccataggcatagggtgagtgcaattaacaactatgctcagaagttgtgtactttctccttcctgatctgtaagggtgtgaataaggagtatctcatgtattcagccctgaccagagacccctttagtgtgattgaagaatccctgcctggtgggctcaaggagcatgatttcaacccagaagaggctgaagaaacaaaacaggtgagctggaagcttgtgactgaatatgcaatggagacaaagtgtgatgatgtcctgctcctcctgggaatgtacctggaatttcagtatagctttgaaatgtgtctgaaatgtatcaaaaaggaacagccttctcattataagtatcatgaaaagcactatgccaatgcagctatatttgcagattctaaaaaccagaaaaccatttgtcagcaagctgttgacacagttctggccaagaaaagagtagactctctccagcttaccagggagcagatgttgacaaataggttcaatgaccttctggacagaatggacataatgtttggctcaactggatctgcagatatagaggagtggatggctggagtggcctggctgcactgtctcctccctaaaatggacagtgtagtctatgacttccttaagtgtatggtctataatatccctaaaaagagatactggttgttcaagggacccattgattcagggaaaactacccttgctgctgcacttctggaactctgtggtgggaaagctctcaatgtcaacctgccacttgatagactcaactttgagctgggggtggcaattgatcagtttttggtagtgtttgaagatgtgaaaggtacaggaggagagtccagggatttgcctagtggccaaggcatcaacaatctggacaacctcagagactacctggatgggtctgtaaaggtcaaccttgaaaaaaagcatctcaacaagaggactcaaatatttccacctggaatagtcactatgaatgaatattcagtgcccaagaccctccaggctagatttgtcaagcaaattgatttcagacctaaagattatctgaaacattgtttggagaggagtgagttcctccttgagaaaaggattattcagtcaggaatagcactgcttcttatgctgatatggtatagaccagtggctgagtttgcccaaagcattcagagtagaatagttgagtggaaagaaaggcttgacaaggagttttctctttcagtatatcaaaagatgaagttcaatgtggctatgggtattggagtgcttgattggttgagaaacagtgatgatgatgatgaagattctcaggaaaatgctgataaaaatgaggatgggggagagaagaatatggaagattctggtcatgaaactggcattgatagtcagagccaggggagtttccaggctccacagagctcccaaagtgtccatgaccacaaccagccttaccatatatgcagaggttttacttgtttcaagaaacctcccactccccctccagaacctgaaacatgagcggccgcgactctagatcataatcagccataccacatttgtagaggttttacttgctttaaaaaacctcccacacctccccctgaacctgaaacataaaatgaatgcaattgttgttgttaacttgtttattgcagcttataatggttacaaataaagcaatagcatcacaaatttcacaaataaagcatttttttcactgcattctagttgtggtttgtccaaactcatcaatgtatcttaaggcgtaaattgtaagcgttaatattttgttaaaattcgcgttaaatttttgttaaatcagctcattttttaaccaataggccgaaatcggcaaaatcccttataaatcaaaagaatagaccgagatagggttgagtgttgttccagtttggaacaagagtccactattaaagaacgtggactccaacgtcaaagggcgaaaaaccgtctatcagggcgatggcccactacgtgaaccatcaccctaatcaagttttttggggtcgaggtgccgtaaagcactaaatcggaaccctaaagggagcccccgatttagagcttgacggggaaagccggcgaacgtggcgagaaaggaagggaagaaagcgaaaggagcgggcgctagggcgctggcaagtgtagcggtcacgctgcgcgtaaccaccacacccgccgcgcttaatgcgccgctacagggcgcgtcaggtggcacttttcggggaaatgtgcgcggaacccctatttgtttatttttctaaatacattcaaatatgtatccgctcatgagacaataaccctgataaatgcttcaataatattgaaaaaggaagagtcctgaggcggaaagaaccagctgtggaatgtgtgtcagttagggtgtggaaagtccccaggctccccagcaggcagaagtatgcaaagcatgcatctcaattagtcagcaaccaggtgtggaaagtccccaggctccccagcaggcagaagtatgcaaagcatgcatctcaattagtcagcaaccatagtcccgcccctaactccgcccatcccgcccctaactccgcccagttccgcccattctccgccccatggctgactaattttttttatttatgcagaggccgaggccgcctcggcctctgagctattccagaagtagtgaggaggcttttttggaggcctaggcttttgcaaagatcgatcaagagacaggatgaggatcgtttcgcatgattgaacaagatggattgcacgcaggttctccggccgcttgggtggagaggctattcggctatgactgggcacaacagacaatcggctgctctgatgccgccgtgttccggctgtcagcgcaggggcgcccggttctttttgtcaagaccgacctgtccggtgccctgaatgaactgcaagacgaggcagcgcggctatcgtggctggccacgacgggcgttccttgcgcagctgtgctcgacgttgtcactgaagcgggaagggactggctgctattgggcgaagtgccggggcaggatctcctgtcatctcaccttgctcctgccgagaaagtatccatcatggctgatgcaatgcggcggctgcatacgcttgatccggctacctgcccattcgaccaccaagcgaaacatcgcatcgagcgagcacgtactcggatggaagccggtcttgtcgatcaggatgatctggacgaagagcatcaggggctcgcgccagccgaactgttcgccaggctcaaggcgagcatgcccgacggcgaggatctcgtcgtgacccatggcgatgcctgcttgccgaatatcatggtggaaaatggccgcttttctggattcatcgactgtggccggctgggtgtggcggaccgctatcaggacatagcgttggctacccgtgatattgctgaagagcttggcggcgaatgggctgaccgcttcctcgtgctttacggtatcgccgctcccgattcgcagcgcatcgccttctatcgccttcttgacgagttcttctgagcgggactctggggttcgaaatgaccgaccaagcgacgcccaacctgccatcacgagatttcgattccaccgccgccttctatgaaaggttgggcttcggaatcgttttccgggacgccggctggatgatcctccagcgcggggatctcatgctggagttcttcgcccaccctagggggaggctaactgaaacacggaaggagacaataccggaaggaacccgcgctatgacggcaataaaaagacagaataaaacgcacggtgttgggtcgtttgttcataaacgcggggttcggtcccagggctggcactctgtcgataccccaccgagaccccattggggccaatacgcccgcgtttcttccttttccccaccccaccccccaagttcgggtgaaggcccagggctcgcagccaacgtcggggcggcaggccctgccatagcctcaggttactcatatatactttagattgatttaaaacttcatttttaatttaaaaggatctaggtgaagatcctttttgataatctcatgaccaaaatcccttaacgtgagttttcgttccactgagcgtcagaccccgtagaaaagatcaaaggatcttcttgagatcctttttttctgcgcgtaatctgctgcttgcaaacaaaaaaaccaccgctaccagcggtggtttgtttgccggatcaagagctaccaactctttttccgaaggtaactggcttcagcagagcgcagataccaaatactgtccttctagtgtagccgtagttaggccaccacttcaagaactctgtagcaccgcctacatacctcgctctgctaatcctgttaccagtggctgctgccagtggcgataagtcgtgtcttaccgggttggactcaagacgatagttaccggataaggcgcagcggtcgggctgaacggggggttcgtgcacacagcccagcttggagcgaacgacctacaccgaactgagatacctacagcgtgagctatgagaaagcgccacgcttcccgaagggagaaaggcggacaggtatccggtaagcggcagggtcggaacaggagagcgcacgagggagcttccagggggaaacgcctggtatctttatagtcctgtcgggtttcgccacctctgacttgagcgtcgatttttgtgatgctcgtcaggggggcggagcctatggaaaaacgccagcaacgcggcctttttacggttcctggccttttgctggccttttgctcacatgttctttcctgcgttatcccctgattctgtggataaccgtattaccgccatgcat

SEQ ID NO: 704 - DNA, 7080 bp, Artificial Sequence
  pCzBRVp15-I-T
  CDS (603)...(1022): BRVp15
tagttattaatagtaatcaattacggggtcattagttcatagcccatatatggagttccgcgttacataacttacggtaaatggcccgcctggctgaccgcccaacgacccccgcccattgacgtcaataatgacgtatgttcccatagtaacgccaatagggactttccattgacgtcaatgggtggagtatttacggtaaactgcccacttggcagtacatcaagtgtatcatatgccaagtacgccccctattgacgtcaatgacggtaaatggcccgcctggcattatgcccagtacatgaccttatgggactttcctacttggcagtacatctacgtattagtcatcgctattaccatggtgatgcggttttggcagtacatcaatgggcgtggatagcggtttgactcacggggatttccaagtctccaccccattgacgtcaatgggagtttgttttggcaccaaaatcaacgggactttccaaaatgtcgtaacaactccgccccattgacgcaaatgggcggtaggcgtgtacggtgggaggtctatataagcagagctggtttagtgaaccgtcagatccgctagctagaccatgggtcaaagacattcaatagttcaaccaccagctccaccgccaaatgcttttgttgaaattgtgagcagttctactggcattataatcgctgttggcatatttgcatttatattctcatttttatataagttgctgcagtggtacaatcgtaagtcaaagaataagaaacgtaaagagcaaattagagaacaaattgagcttggtttattatcatatggtgctggagtagcatcacttcctttgctcaacgttattgcacataatcctggatcagttatctcggctacccctatctataaaggtccgtgcactggtgtacctaattcgcgcctacttcaaatcacgagcgggactgcagaagagaacactagaattttgaatcatgatggaagaaacccagatggaagtatcaacgtttgaggatccgcccctctccctcccccccccctaacgttactggccgaagccgcttggaataaggccggtgtgcgtttgtctatatgttattttccaccatattgccgtcttttggcaatgtgagggcccggaaacctggccctgtcttcttgacgagcattcctaggggtctttcccctctcgccaaaggaatgcaaggtctgttgaatgtcgtgaaggaagcagttcctctggaagcttcttgaagacaaacaacgtctgtagcgaccctttgcaggcagcggaaccccccacctggcgacaggtgcctctgcggccaaaagccacgtgtataagatacacctgcaaaggcggcacaaccccagtgccacgttgtgagttggatagttgtggaaagagtcaaatggctctcctcaagcgtattcaacaaggggctgaaggatgcccagaaggtaccccattgtatgggatctgatctggggcctcggtgcacatgctttacatgtgtttagtcgaggttaaaaaaacgtctaggccccccgaaccacggggacgtggttttcctttgaaaaacacgatgataatatggccacaaccatggacaaagtgctgaatagggaggaaagtctgcaactgatggatctgttgggacttgagaggtctgcatggggtaatatcccacttatgaggaaagcatacctgaagaagtgtaaagagttccatcctgacaaaggtggagatgaagagaagatgaaaaagatgaacacactgtataagaaaatggaagatggtgtaaagtatgctcaccagccagattttggaggtttttgggatgccacagagatacctacttatggtacagatgagtgggaacagtggtggaatgcatttaatgaagagaatttgttttgctctgaggaaatgcctagttctgatgatgaggccacagctgactcccagcacagtactccacccaagaaaaagagaaaagtggaagacccaaaggatttcccctctgaactcttgtccttcttgtctcatgcagtgttctcaaataggaccctggcttgctttgctatctacactactaaggagaaggcagctctcttgtacaagaaaatcatggaaaagtattctgtcacctttatttccaggcacaactcctataatcataatattctctttttcttgacaccccataggcatagggtgagtgcaattaacaactatgctcagaagttgtgtactttctccttcctgatctgtaagggtgtgaataaggagtatctcatgtattcagccctgaccagagacccctttagtgtgattgaagaatccctgcctggtgggctcaaggagcatgatttcaacccagaagaggctgaagaaacaaaacaggtgagctggaagcttgtgactgaatatgcaatggagacaaagtgtgatgatgtcctgctcctcctgggaatgtacctggaatttcagtatagctttgaaatgtgtctgaaatgtatcaaaaaggaacagccttctcattataagtatcatgaaaagcactatgccaatgcagctatatttgcagattctaaaaaccagaaaaccatttgtcagcaagctgttgacacagttctggccaagaaaagagtagactctctccagcttaccagggagcagatgttgacaaataggttcaatgaccttctggacagaatggacataatgtttggctcaactggatctgcagatatagaggagtggatggctggagtggcctggctgcactgtctcctccctaaaatggacagtgtagtctatgacttccttaagtgtatggtctataatatccctaaaaagagatactggttgttcaagggacccattgattcagggaaaactacccttgctgctgcacttctggaactctgtggtgggaaagctctcaatgtcaacctgccacttgatagactcaactttgagctgggggtggcaattgatcagtttttggtagtgtttgaagatgtgaaaggtacaggaggagagtccagggatttgcctagtggccaaggcatcaacaatctggacaacctcagagactacctggatgggtctgtaaaggtcaaccttgaaaaaaagcatctcaacaagaggactcaaatatttccacctggaatagtcactatgaatgaatattcagtgcccaagaccctccaggctagatttgtcaagcaaattgatttcagacctaaagattatctgaaacattgtttggagaggagtgagttcctccttgagaaaaggattattcagtcaggaatagcactgcttcttatgctgatatggtatagaccagtggctgagtttgcccaaagcattcagagtagaatagttgagtggaaagaaaggcttgacaaggagttttctctttcagtatatcaaaagatgaagttcaatgtggctatgggtattggagtgcttgattggttgagaaacagtgatgatgatgatgaagattctcaggaaaatgctgataaaaatgaggatgggggagagaagaatatggaagattctggtcatgaaactggcattgatagtcagagccaggggagtttccaggctccacagagctcccaaagtgtccatgaccacaaccagccttaccatatatgcagaggttttacttgtttcaagaaacctcccactccccctccagaacctgaaacatgagcggccgcgactctagatcataatcagccataccacatttgtagaggttttacttgctttaaaaaacctcccacacctccccctgaacctgaaacataaaatgaatgcaattgttgttgttaacttgtttattgcagcttataatggttacaaataaagcaatagcatcacaaatttcacaaataaagcatttttttcactgcattctagttgtggtttgtccaaactcatcaatgtatcttaaggcgtaaattgtaagcgttaatattttgttaaaattcgcgttaaatttttgttaaatcagctcattttttaaccaataggccgaaatcggcaaaatcccttataaatcaaaagaatagaccgagatagggttgagtgttgttccagtttggaacaagagtccactattaaagaacgtggactccaacgtcaaagggcgaaaaaccgtctatcagggcgatggcccactacgtgaaccatcaccctaatcaagttttttggggtcgaggtgccgtaaagcactaaatcggaaccctaaagggagcccccgatttagagcttgacggggaaagccggcgaacgtggcgagaaaggaagggaagaaagcgaaaggagcgggcgctagggcgctggcaagtgtagcggtcacgctgcgcgtaaccaccacacccgccgcgcttaatgcgccgctacagggcgcgtcaggtggcacttttcggggaaatgtgcgcggaacccctatttgtttatttttctaaatacattcaaatatgtatccgctcatgagacaataaccctgataaatgcttcaataatattgaaaaaggaagagtcctgaggcggaaagaaccagctgtggaatgtgtgtcagttagggtgtggaaagtccccaggctccccagcaggcagaagtatgcaaagcatgcatctcaattagtcagcaaccaggtgtggaaagtccccaggctccccagcaggcagaagtatgcaaagcatgcatctcaattagtcagcaaccatagtcccgcccctaactccgcccatcccgcccctaactccgcccagttccgcccattctccgccccatggctgactaattttttttatttatgcagaggccgaggccgcctcggcctctgagctattccagaagtagtgaggaggcttttttggaggcctaggcttttgcaaagatcgatcaagagacaggatgaggatcgtttcgcatgattgaacaagatggattgcacgcaggttctccggccgcttgggtggagaggctattcggctatgactgggcacaacagacaatcggctgctctgatgccgccgtgttccggctgtcagcgcaggggcgcccggttctttttgtcaagaccgacctgtccggtgccctgaatgaactgcaagacgaggcagcgcggctatcgtggctggccacgacgggcgttccttgcgcagctgtgctcgacgttgtcactgaagcgggaagggactggctgctattgggcgaagtgccggggcaggatctcctgtcatctcaccttgctcctgccgagaaagtatccatcatggctgatgcaatgcggcggctgcatacgcttgatccggctacctgcccattcgaccaccaagcgaaacatcgcatcgagcgagcacgtactcggatggaagccggtcttgtcgatcaggatgatctggacgaagagcatcaggggctcgcgccagccgaactgttcgccaggctcaaggcgagcatgcccgacggcgaggatctcgtcgtgacccatggcgatgcctgcttgccgaatatcatggtggaaaatggccgcttttctggattcatcgactgtggccggctgggtgtggcggaccgctatcaggacatagcgttggctacccgtgatattgctgaagagcttggcggcgaatgggctgaccgcttcctcgtgctttacggtatcgccgctcccgattcgcagcgcatcgccttctatcgccttcttgacgagttcttctgagcgggactctggggttcgaaatgaccgaccaagcgacgcccaacctgccatcacgagatttcgattccaccgccgccttctatgaaaggttgggcttcggaatcgttttccgggacgccggctggatgatcctccagcgcggggatctcatgctggagttcttcgcccaccctagggggaggctaactgaaacacggaaggagacaataccggaaggaacccgcgctatgacggcaataaaaagacagaataaaacgcacggtgttgggtcgtttgttcataaacgcggggttcggtcccagggctggcactctgtcgataccccaccgagaccccattggggccaatacgcccgcgtttcttccttttccccaccccaccccccaagttcgggtgaaggcccagggctcgcagccaacgtcggggcggcaggccctgccatagcctcaggttactcatatatactttagattgatttaaaacttcatttttaatttaaaaggatctaggtgaagatcctttttgataatctcatgaccaaaatcccttaacgtgagttttcgttccactgagcgtcagaccccgtagaaaagatcaaaggatcttcttgagatcctttttttctgcgcgtaatctgctgcttgcaaacaaaaaaaccaccgctaccagcggtggtttgtttgccggatcaagagctaccaactctttttccgaaggtaactggcttcagcagagcgcagataccaaatactgtccttctagtgtagccgtagttaggccaccacttcaagaactctgtagcaccgcctacatacctcgctctgctaatcctgttaccagtggctgctgccagtggcgataagtcgtgtcttaccgggttggactcaagacgatagttaccggataaggcgcagcggtcgggctgaacggggggttcgtgcacacagcccagcttggagcgaacgacctacaccgaactgagatacctacagcgtgagctatgagaaagcgccacgcttcccgaagggagaaaggcggacaggtatccggtaagcggcagggtcggaacaggagagcgcacgagggagcttccagggggaaacgcctggtatctttatagtcctgtcgggtttcgccacctctgacttgagcgtcgatttttgtgatgctcgtcaggggggcggagcctatggaaaaacgccagcaacgcggcctttttacggttcctggccttttgctggccttttgctcacatgttctttcctgcgttatcccctgattctgtggataaccgtattaccgccatgcat

SEQ ID NO: 705 - DNA, 8661 bp, Artificial Sequence
  pCzGALV-I-T
  CDS (603)...(2603): zGALV
tagttattaatagtaatcaattacggggtcattagttcatagcccatatatggagttccgcgttacataacttacggtaaatggcccgcctggctgaccgcccaacgacccccgcccattgacgtcaataatgacgtatgttcccatagtaacgccaatagggactttccattgacgtcaatgggtggagtatttacggtaaactgcccacttggcagtacatcaagtgtatcatatgccaagtacgccccctattgacgtcaatgacggtaaatggcccgcctggcattatgcccagtacatgaccttatgggactttcctacttggcagtacatctacgtattagtcatcgctattaccatggtgatgcggttttggcagtacatcaatgggcgtggatagcggtttgactcacggggatttccaagtctccaccccattgacgtcaatgggagtttgttttggcaccaaaatcaacgggactttccaaaatgtcgtaacaactccgccccattgacgcaaatgggcggtaggcgtgtacggtgggaggtctatataagcagagctggtttagtgaaccgtcagatccgctagctagaccatggtcctgctgccaggctcaatgctgctgaccagcaatctccaccacctgagacaccagatgtcacctgggtcctggaagagacttatcattcttctgtcctgtgtgtttgggggtggaggcaccagcctgcaaaataagaacccacatcagcccatgaccctcacctggcaggtcctgagccagacaggtgatgttgtctgggataccaaagcagtccagcccccctggacttggtggcccaccttgaaacctgatgtctgtgccctggcagctagtctggagagctgggacatcccaggcactgatgtcagcagcagcaagagggttaggccacctgacagtgactacactgcagcctacaagcagatcacctggggagccattggctgctcctaccctagagctagaaccagaatggcctccagtaccttctatgtctgccctagagatggcagaactctgtctgaggccaggagatgtggtggactggaatccctctactgcaaagagtgggactgtgagactactggcacaggctattggttgtccaagtcatccaaggacttgatcactgtgaagtgggatcagaattcagagtggacccagaaatttcagcaatgccaccagacaggctggtgcaaccccttgaagattgactttacagataaggggaagctcagtaaagactggatcacaggcaaaacctggggactgaggttctatgtttctggccatccaggtgttcagttcaccatcagattgaaaatcaccaatatgccagctgtggcagtgggtcctgaccttgtgctggtggaacagggcccacccaggacatccttggccttgcctccacccctccctcccagggaagccccccctccaagcttgcctgactccaattctacagctctggctactagtgcccaaactcctactgtgaggaagaccattgtcacactcaatacaccccctccaactacaggagacaggttgtttgaccttgtgcaaggtgccttccttacacttaatgccaccaaccctggagccacagaaagttgttggctgtgcctggcaatgggtccaccctactatgaggcaattgcaagttctggtgaagtggcatatagcactgacctggatagatgtaggtgggggacccagggaaaactcacacttactgaagtgagtgggcatggcctgtgcattggaaaagtcccattcacacaccaacatctgtgcaaccaaacactctccatcaactcttctggtgaccaccagtacctgcttccaagcaaccacagctggtgggcctgcagcactgggctgaccccctgcctgagcacctctgtgttcaatcagacaagagatttctgtatccaggtgcagctcattcccagaatctactactatcctgaggaggtgctgctgcaagcctatgacaacagtcatcccaggactaagagggaagcagtgagtctcaccctggctgttctgctgggcctgggaatcacagctgggattggtacaggctcaacagcccttatcaagggccccattgacctgcagcaaggactgacttcccttcagattgcaattgatgctgatctgagagccctgcaggattctgtgtccaaactggaggacagccttacctctctctcagaagtggttcttcagaacaggagaggactggacttgctctttctcaaagagggagggctttgtgctgccctcaaggaggagtgttgcttttacattgatcattctggggctgttagagattcaatgaaaaagctcaaggagaaattggataaaaggcagctggaaagacagaagtctcaaaactggtatgaagggtggttcaacaatagtccttggttcactaccttgctgagcactattgctggcccactcttgctgctgttgctcctgctcatcctggggccctgtatcatcaacaagctggtgcagtttatcaatgacaggatcagtgcctgctgaggatccgcccctctccctcccccccccctaacgttactggccgaagccgcttggaataaggccggtgtgcgtttgtctatatgttattttccaccatattgccgtcttttggcaatgtgagggcccggaaacctggccctgtcttcttgacgagcattcctaggggtctttcccctctcgccaaaggaatgcaaggtctgttgaatgtcgtgaaggaagcagttcctctggaagcttcttgaagacaaacaacgtctgtagcgaccctttgcaggcagcggaaccccccacctggcgacaggtgcctctgcggccaaaagccacgtgtataagatacacctgcaaaggcggcacaaccccagtgccacgttgtgagttggatagttgtggaaagagtcaaatggctctcctcaagcgtattcaacaaggggctgaaggatgcccagaaggtaccccattgtatgggatctgatctggggcctcggtgcacatgctttacatgtgtttagtcgaggttaaaaaaacgtctaggccccccgaaccacggggacgtggttttcctttgaaaaacacgatgataatatggccacaaccatggacaaagtgctgaatagggaggaaagtctgcaactgatggatctgttgggacttgagaggtctgcatggggtaatatcccacttatgaggaaagcatacctgaagaagtgtaaagagttccatcctgacaaaggtggagatgaagagaagatgaaaaagatgaacacactgtataagaaaatggaagatggtgtaaagtatgctcaccagccagattttggaggtttttgggatgccacagagatacctacttatggtacagatgagtgggaacagtggtggaatgcatttaatgaagagaatttgttttgctctgaggaaatgcctagttctgatgatgaggccacagctgactcccagcacagtactccacccaagaaaaagagaaaagtggaagacccaaaggatttcccctctgaactcttgtccttcttgtctcatgcagtgttctcaaataggaccctggcttgctttgctatctacactactaaggagaaggcagctctcttgtacaagaaaatcatggaaaagtattctgtcacctttatttccaggcacaactcctataatcataatattctctttttcttgacaccccataggcatagggtgagtgcaattaacaactatgctcagaagttgtgtactttctccttcctgatctgtaagggtgtgaataaggagtatctcatgtattcagccctgaccagagacccctttagtgtgattgaagaatccctgcctggtgggctcaaggagcatgatttcaacccagaagaggctgaagaaacaaaacaggtgagctggaagcttgtgactgaatatgcaatggagacaaagtgtgatgatgtcctgctcctcctgggaatgtacctggaatttcagtatagctttgaaatgtgtctgaaatgtatcaaaaaggaacagccttctcattataagtatcatgaaaagcactatgccaatgcagctatatttgcagattctaaaaaccagaaaaccatttgtcagcaagctgttgacacagttctggccaagaaaagagtagactctctccagcttaccagggagcagatgttgacaaataggttcaatgaccttctggacagaatggacataatgtttggctcaactggatctgcagatatagaggagtggatggctggagtggcctggctgcactgtctcctccctaaaatggacagtgtagtctatgacttccttaagtgtatggtctataatatccctaaaaagagatactggttgttcaagggacccattgattcagggaaaactacccttgctgctgcacttctggaactctgtggtgggaaagctctcaatgtcaacctgccacttgatagactcaactttgagctgggggtggcaattgatcagtttttggtagtgtttgaagatgtgaaaggtacaggaggagagtccagggatttgcctagtggccaaggcatcaacaatctggacaacctcagagactacctggatgggtctgtaaaggtcaaccttgaaaaaaagcatctcaacaagaggactcaaatatttccacctggaatagtcactatgaatgaatattcagtgcccaagaccctccaggctagatttgtcaagcaaattgatttcagacctaaagattatctgaaacattgtttggagaggagtgagttcctccttgagaaaaggattattcagtcaggaatagcactgcttcttatgctgatatggtatagaccagtggctgagtttgcccaaagcattcagagtagaatagttgagtggaaagaaaggcttgacaaggagttttctctttcagtatatcaaaagatgaagttcaatgtggctatgggtattggagtgcttgattggttgagaaacagtgatgatgatgatgaagattctcaggaaaatgctgataaaaatgaggatgggggagagaagaatatggaagattctggtcatgaaactggcattgatagtcagagccaggggagtttccaggctccacagagctcccaaagtgtccatgaccacaaccagccttaccatatatgcagaggttttacttgtttcaagaaacctcccactccccctccagaacctgaaacatgagcggccgcgactctagatcataatcagccataccacatttgtagaggttttacttgctttaaaaaacctcccacacctccccctgaacctgaaacataaaatgaatgcaattgttgttgttaacttgtttattgcagcttataatggttacaaataaagcaatagcatcacaaatttcacaaataaagcatttttttcactgcattctagttgtggtttgtccaaactcatcaatgtatcttaaggcgtaaattgtaagcgttaatattttgttaaaattcgcgttaaatttttgttaaatcagctcattttttaaccaataggccgaaatcggcaaaatcccttataaatcaaaagaatagaccgagatagggttgagtgttgttccagtttggaacaagagtccactattaaagaacgtggactccaacgtcaaagggcgaaaaaccgtctatcagggcgatggcccactacgtgaaccatcaccctaatcaagttttttggggtcgaggtgccgtaaagcactaaatcggaaccctaaagggagcccccgatttagagcttgacggggaaagccggcgaacgtggcgagaaaggaagggaagaaagcgaaaggagcgggcgctagggcgctggcaagtgtagcggtcacgctgcgcgtaaccaccacacccgccgcgcttaatgcgccgctacagggcgcgtcaggtggcacttttcggggaaatgtgcgcggaacccctatttgtttatttttctaaatacattcaaatatgtatccgctcatgagacaataaccctgataaatgcttcaataatattgaaaaaggaagagtcctgaggcggaaagaaccagctgtggaatgtgtgtcagttagggtgtggaaagtccccaggctccccagcaggcagaagtatgcaaagcatgcatctcaattagtcagcaaccaggtgtggaaagtccccaggctccccagcaggcagaagtatgcaaagcatgcatctcaattagtcagcaaccatagtcccgcccctaactccgcccatcccgcccctaactccgcccagttccgcccattctccgccccatggctgactaattttttttatttatgcagaggccgaggccgcctcggcctctgagctattccagaagtagtgaggaggcttttttggaggcctaggcttttgcaaagatcgatcaagagacaggatgaggatcgtttcgcatgattgaacaagatggattgcacgcaggttctccggccgcttgggtggagaggctattcggctatgactgggcacaacagacaatcggctgctctgatgccgccgtgttccggctgtcagcgcaggggcgcccggttctttttgtcaagaccgacctgtccggtgccctgaatgaactgcaagacgaggcagcgcggctatcgtggctggccacgacgggcgttccttgcgcagctgtgctcgacgttgtcactgaagcgggaagggactggctgctattgggcgaagtgccggggcaggatctcctgtcatctcaccttgctcctgccgagaaagtatccatcatggctgatgcaatgcggcggctgcatacgcttgatccggctacctgcccattcgaccaccaagcgaaacatcgcatcgagcgagcacgtactcggatggaagccggtcttgtcgatcaggatgatctggacgaagagcatcaggggctcgcgccagccgaactgttcgccaggctcaaggcgagcatgcccgacggcgaggatctcgtcgtgacccatggcgatgcctgcttgccgaatatcatggtggaaaatggccgcttttctggattcatcgactgtggccggctgggtgtggcggaccgctatcaggacatagcgttggctacccgtgatattgctgaagagcttggcggcgaatgggctgaccgcttcctcgtgctttacggtatcgccgctcccgattcgcagcgcatcgccttctatcgccttcttgacgagttcttctgagcgggactctggggttcgaaatgaccgaccaagcgacgcccaacctgccatcacgagatttcgattccaccgccgccttctatgaaaggttgggcttcggaatcgttttccgggacgccggctggatgatcctccagcgcggggatctcatgctggagttcttcgcccaccctagggggaggctaactgaaacacggaaggagacaataccggaaggaacccgcgctatgacggcaataaaaagacagaataaaacgcacggtgttgggtcgtttgttcataaacgcggggttcggtcccagggctggcactctgtcgataccccaccgagaccccattggggccaatacgcccgcgtttcttccttttccccaccccaccccccaagttcgggtgaaggcccagggctcgcagccaacgtcggggcggcaggccctgccatagcctcaggttactcatatatactttagattgatttaaaacttcatttttaatttaaaaggatctaggtgaagatcctttttgataatctcatgaccaaaatcccttaacgtgagttttcgttccactgagcgtcagaccccgtagaaaagatcaaaggatcttcttgagatcctttttttctgcgcgtaatctgctgcttgcaaacaaaaaaaccaccgctaccagcggtggtttgtttgccggatcaagagctaccaactctttttccgaaggtaactggcttcagcagagcgcagataccaaatactgtccttctagtgtagccgtagttaggccaccacttcaagaactctgtagcaccgcctacatacctcgctctgctaatcctgttaccagtggctgctgccagtggcgataagtcgtgtcttaccgggttggactcaagacgatagttaccggataaggcgcagcggtcgggctgaacggggggttcgtgcacacagcccagcttggagcgaacgacctacaccgaactgagatacctacagcgtgagctatgagaaagcgccacgcttcccgaagggagaaaggcggacaggtatccggtaagcggcagggtcggaacaggagagcgcacgagggagcttccagggggaaacgcctggtatctttatagtcctgtcgggtttcgccacctctgacttgagcgtcgatttttgtgatgctcgtcaggggggcggagcctatggaaaaacgccagcaacgcggcctttttacggttcctggccttttgctggccttttgctcacatgttctttcctgcgttatcccctgattctgtggataaccgtattaccgccatgcat

SEQ ID NO: 706 - DNA, 7377 bp, Artificial Sequence
  pCzGFP-I-T(E107L)
tagttattaatagtaatcaattacggggtcattagttcatagcccatatatggagttccgcgttacataacttacggtaaatggcccgcctggctgaccgcccaacgacccccgcccattgacgtcaataatgacgtatgttcccatagtaacgccaatagggactttccattgacgtcaatgggtggagtatttacggtaaactgcccacttggcagtacatcaagtgtatcatatgccaagtacgccccctattgacgtcaatgacggtaaatggcccgcctggcattatgcccagtacatgaccttatgggactttcctacttggcagtacatctacgtattagtcatcgctattaccatggtgatgcggttttggcagtacatcaatgggcgtggatagcggtttgactcacggggatttccaagtctccaccccattgacgtcaatgggagtttgttttggcaccaaaatcaacgggactttccaaaatgtcgtaacaactccgccccattgacgcaaatgggcggtaggcgtgtacggtgggaggtctatataagcagagctggtttagtgaaccgtcagatccgctagctagaccatggtgagcaagggagaggaactctttacaggtgtggtcccaattctggtggagctggatggagatgtgaatgggcacaaattttctgtcagtggagagggagagggggatgctacctatggcaaactgactctgaagttcatctgcactactggcaagctgcctgtgccatggccaactctggtgacaaccctcacctatggagtccagtgcttttccagatatcctgaccacatgaaacagcatgactttttcaaatctgcaatgcctgagggctatgtgcaagagagaactatctttttcaaggatgatgggaactataagactagggctgaggtgaaatttgaaggagacaccctggtcaataggattgagctcaaggggattgacttcaaggaggatggcaacattctgggccataagctggagtataattacaattcccacaatgtctacattatggctgacaagcagaagaatggcattaaggtcaacttcaagattagacacaacatagaggatggatctgtgcagctggctgaccattaccagcagaatacacctattggggatgggccagtgctgctccctgacaatcactatctgagcacccaatctgctttgtctaaagatcctaatgaaaagagagatcacatggtgctgctggagtttgtaactgctgcaggaattaccttgggtatggatgaactctataagtaaggatccgcccctctccctcccccccccctaacgttactggccgaagccgcttggaataaggccggtgtgcgtttgtctatatgttattttccaccatattgccgtcttttggcaatgtgagggcccggaaacctggccctgtcttcttgacgagcattcctaggggtctttcccctctcgccaaaggaatgcaaggtctgttgaatgtcgtgaaggaagcagttcctctggaagcttcttgaagacaaacaacgtctgtagcgaccctttgcaggcagcggaaccccccacctggcgacaggtgcctctgcggccaaaagccacgtgtataagatacacctgcaaaggcggcacaaccccagtgccacgttgtgagttggatagttgtggaaagagtcaaatggctctcctcaagcgtattcaacaaggggctgaaggatgcccagaaggtaccccattgtatgggatctgatctggggcctcggtgcacatgctttacatgtgtttagtcgaggttaaaaaaacgtctaggccccccgaaccacggggacgtggttttcctttgaaaaacacgatgataatatggccacaaccatggacaaagtgctgaatagggaggaaagtctgcaactgatggatctgttgggacttgagaggtctgcatggggtaatatcccacttatgaggaaagcatacctgaagaagtgtaaagagttccatcctgacaaaggtggagatgaagagaagatgaaaaagatgaacacactgtataagaaaatggaagatggtgtaaagtatgctcaccagccagattttggaggtttttgggatgccacagagatacctacttatggtacagatgagtgggaacagtggtggaatgcatttaatgaagagaatttgttttgctctctggaaatgcctagttctgatgatgaggccacagctgactcccagcacagtactccacccaagaaaaagagaaaagtggaagacccaaaggatttcccctctgaactcttgtccttcttgtctcatgcagtgttctcaaataggaccctggcttgctttgctatctacactactaaggagaaggcagctctcttgtacaagaaaatcatggaaaagtattctgtcacctttatttccaggcacaactcctataatcataatattctctttttcttgacaccccataggcatagggtgagtgcaattaacaactatgctcagaagttgtgtactttctccttcctgatctgtaagggtgtgaataaggagtatctcatgtattcagccctgaccagagacccctttagtgtgattgaagaatccctgcctggtgggctcaaggagcatgatttcaacccagaagaggctgaagaaacaaaacaggtgagctggaagcttgtgactgaatatgcaatggagacaaagtgtgatgatgtcctgctcctcctgggaatgtacctggaatttcagtatagctttgaaatgtgtctgaaatgtatcaaaaaggaacagccttctcattataagtatcatgaaaagcactatgccaatgcagctatatttgcagattctaaaaaccagaaaaccatttgtcagcaagctgttgacacagttctggccaagaaaagagtagactctctccagcttaccagggagcagatgttgacaaataggttcaatgaccttctggacagaatggacataatgtttggctcaactggatctgcagatatagaggagtggatggctggagtggcctggctgcactgtctcctccctaaaatggacagtgtagtctatgacttccttaagtgtatggtctataatatccctaaaaagagatactggttgttcaagggacccattgattcagggaaaactacccttgctgctgcacttctggaactctgtggtgggaaagctctcaatgtcaacctgccacttgatagactcaactttgagctgggggtggcaattgatcagtttttggtagtgtttgaagatgtgaaaggtacaggaggagagtccagggatttgcctagtggccaaggcatcaacaatctggacaacctcagagactacctggatgggtctgtaaaggtcaaccttgaaaaaaagcatctcaacaagaggactcaaatatttccacctggaatagtcactatgaatgaatattcagtgcccaagaccctccaggctagatttgtcaagcaaattgatttcagacctaaagattatctgaaacattgtttggagaggagtgagttcctccttgagaaaaggattattcagtcaggaatagcactgcttcttatgctgatatggtatagaccagtggctgagtttgcccaaagcattcagagtagaatagttgagtggaaagaaaggcttgacaaggagttttctctttcagtatatcaaaagatgaagttcaatgtggctatgggtattggagtgcttgattggttgagaaacagtgatgatgatgatgaagattctcaggaaaatgctgataaaaatgaggatgggggagagaagaatatggaagattctggtcatgaaactggcattgatagtcagagccaggggagtttccaggctccacagagctcccaaagtgtccatgaccacaaccagccttaccatatatgcagaggttttacttgtttcaagaaacctcccactccccctccagaacctgaaacatgagcggccgcgactctagatcataatcagccataccacatttgtagaggttttacttgctttaaaaaacctcccacacctccccctgaacctgaaacataaaatgaatgcaattgttgttgttaacttgtttattgcagcttataatggttacaaataaagcaatagcatcacaaatttcacaaataaagcatttttttcactgcattctagttgtggtttgtccaaactcatcaatgtatcttaaggcgtaaattgtaagcgttaatattttgttaaaattcgcgttaaatttttgttaaatcagctcattttttaaccaataggccgaaatcggcaaaatcccttataaatcaaaagaatagaccgagatagggttgagtgttgttccagtttggaacaagagtccactattaaagaacgtggactccaacgtcaaagggcgaaaaaccgtctatcagggcgatggcccactacgtgaaccatcaccctaatcaagttttttggggtcgaggtgccgtaaagcactaaatcggaaccctaaagggagcccccgatttagagcttgacggggaaagccggcgaacgtggcgagaaaggaagggaagaaagcgaaaggagcgggcgctagggcgctggcaagtgtagcggtcacgctgcgcgtaaccaccacacccgccgcgcttaatgcgccgctacagggcgcgtcaggtggcacttttcggggaaatgtgcgcggaacccctatttgtttatttttctaaatacattcaaatatgtatccgctcatgagacaataaccctgataaatgcttcaataatattgaaaaaggaagagtcctgaggcggaaagaaccagctgtggaatgtgtgtcagttagggtgtggaaagtccccaggctccccagcaggcagaagtatgcaaagcatgcatctcaattagtcagcaaccaggtgtggaaagtccccaggctccccagcaggcagaagtatgcaaagcatgcatctcaattagtcagcaaccatagtcccgcccctaactccgcccatcccgcccctaactccgcccagttccgcccattctccgccccatggctgactaattttttttatttatgcagaggccgaggccgcctcggcctctgagctattccagaagtagtgaggaggcttttttggaggcctaggcttttgcaaagatcgatcaagagacaggatgaggatcgtttcgcatgattgaacaagatggattgcacgcaggttctccggccgcttgggtggagaggctattcggctatgactgggcacaacagacaatcggctgctctgatgccgccgtgttccggctgtcagcgcaggggcgcccggttctttttgtcaagaccgacctgtccggtgccctgaatgaactgcaagacgaggcagcgcggctatcgtggctggccacgacgggcgttccttgcgcagctgtgctcgacgttgtcactgaagcgggaagggactggctgctattgggcgaagtgccggggcaggatctcctgtcatctcaccttgctcctgccgagaaagtatccatcatggctgatgcaatgcggcggctgcatacgcttgatccggctacctgcccattcgaccaccaagcgaaacatcgcatcgagcgagcacgtactcggatggaagccggtcttgtcgatcaggatgatctggacgaagagcatcaggggctcgcgccagccgaactgttcgccaggctcaaggcgagcatgcccgacggcgaggatctcgtcgtgacccatggcgatgcctgcttgccgaatatcatggtggaaaatggccgcttttctggattcatcgactgtggccggctgggtgtggcggaccgctatcaggacatagcgttggctacccgtgatattgctgaagagcttggcggcgaatgggctgaccgcttcctcgtgctttacggtatcgccgctcccgattcgcagcgcatcgccttctatcgccttcttgacgagttcttctgagcgggactctggggttcgaaatgaccgaccaagcgacgcccaacctgccatcacgagatttcgattccaccgccgccttctatgaaaggttgggcttcggaatcgttttccgggacgccggctggatgatcctccagcgcggggatctcatgctggagttcttcgcccaccctagggggaggctaactgaaacacggaaggagacaataccggaaggaacccgcgctatgacggcaataaaaagacagaataaaacgcacggtgttgggtcgtttgttcataaacgcggggttcggtcccagggctggcactctgtcgataccccaccgagaccccattggggccaatacgcccgcgtttcttccttttccccaccccaccccccaagttcgggtgaaggcccagggctcgcagccaacgtcggggcggcaggccctgccatagcctcaggttactcatatatactttagattgatttaaaacttcatttttaatttaaaaggatctaggtgaagatcctttttgataatctcatgaccaaaatcccttaacgtgagttttcgttccactgagcgtcagaccccgtagaaaagatcaaaggatcttcttgagatcctttttttctgcgcgtaatctgctgcttgcaaacaaaaaaaccaccgctaccagcggtggtttgtttgccggatcaagagctaccaactctttttccgaaggtaactggcttcagcagagcgcagataccaaatactgtccttctagtgtagccgtagttaggccaccacttcaagaactctgtagcaccgcctacatacctcgctctgctaatcctgttaccagtggctgctgccagtggcgataagtcgtgtcttaccgggttggactcaagacgatagttaccggataaggcgcagcggtcgggctgaacggggggttcgtgcacacagcccagcttggagcgaacgacctacaccgaactgagatacctacagcgtgagctatgagaaagcgccacgcttcccgaagggagaaaggcggacaggtatccggtaagcggcagggtcggaacaggagagcgcacgagggagcttccagggggaaacgcctggtatctttatagtcctgtcgggtttcgccacctctgacttgagcgtcgatttttgtgatgctcgtcaggggggcggagcctatggaaaaacgccagcaacgcggcctttttacggttcctggccttttgctggccttttgctcacatgttctttcctgcgttatcccctgattctgtggataaccgtattaccgccatgcat

SEQ ID NO: 707 - DNA, 7377 bp, Artificial Sequence
  pCzGFP-I-T(E107L/D402R)
tagttattaatagtaatcaattacggggtcattagttcatagcccatatatggagttccgcgttacataacttacggtaaatggcccgcctggctgaccgcccaacgacccccgcccattgacgtcaataatgacgtatgttcccatagtaacgccaatagggactttccattgacgtcaatgggtggagtatttacggtaaactgcccacttggcagtacatcaagtgtatcatatgccaagtacgccccctattgacgtcaatgacggtaaatggcccgcctggcattatgcccagtacatgaccttatgggactttcctacttggcagtacatctacgtattagtcatcgctattaccatggtgatgcggttttggcagtacatcaatgggcgtggatagcggtttgactcacggggatttccaagtctccaccccattgacgtcaatgggagtttgttttggcaccaaaatcaacgggactttccaaaatgtcgtaacaactccgccccattgacgcaaatgggcggtaggcgtgtacggtgggaggtctatataagcagagctggtttagtgaaccgtcagatccgctagctagaccatggtgagcaagggagaggaactctttacaggtgtggtcccaattctggtggagctggatggagatgtgaatgggcacaaattttctgtcagtggagagggagagggggatgctacctatggcaaactgactctgaagttcatctgcactactggcaagctgcctgtgccatggccaactctggtgacaaccctcacctatggagtccagtgcttttccagatatcctgaccacatgaaacagcatgactttttcaaatctgcaatgcctgagggctatgtgcaagagagaactatctttttcaaggatgatgggaactataagactagggctgaggtgaaatttgaaggagacaccctggtcaataggattgagctcaaggggattgacttcaaggaggatggcaacattctgggccataagctggagtataattacaattcccacaatgtctacattatggctgacaagcagaagaatggcattaaggtcaacttcaagattagacacaacatagaggatggatctgtgcagctggctgaccattaccagcagaatacacctattggggatgggccagtgctgctccctgacaatcactatctgagcacccaatctgctttgtctaaagatcctaatgaaaagagagatcacatggtgctgctggagtttgtaactgctgcaggaattaccttgggtatggatgaactctataagtaaggatccgcccctctccctcccccccccctaacgttactggccgaagccgcttggaataaggccggtgtgcgtttgtctatatgttattttccaccatattgccgtcttttggcaatgtgagggcccggaaacctggccctgtcttcttgacgagcattcctaggggtctttcccctctcgccaaaggaatgcaaggtctgttgaatgtcgtgaaggaagcagttcctctggaagcttcttgaagacaaacaacgtctgtagcgaccctttgcaggcagcggaaccccccacctggcgacaggtgcctctgcggccaaaagccacgtgtataagatacacctgcaaaggcggcacaaccccagtgccacgttgtgagttggatagttgtggaaagagtcaaatggctctcctcaagcgtattcaacaaggggctgaaggatgcccagaaggtaccccattgtatgggatctgatctggggcctcggtgcacatgctttacatgtgtttagtcgaggttaaaaaaacgtctaggccccccgaaccacggggacgtggttttcctttgaaaaacacgatgataatatggccacaaccatggacaaagtgctgaatagggaggaaagtctgcaactgatggatctgttgggacttgagaggtctgcatggggtaatatcccacttatgaggaaagcatacctgaagaagtgtaaagagttccatcctgacaaaggtggagatgaagagaagatgaaaaagatgaacacactgtataagaaaatggaagatggtgtaaagtatgctcaccagccagattttggaggtttttgggatgccacagagatacctacttatggtacagatgagtgggaacagtggtggaatgcatttaatgaagagaatttgttttgctctctggaaatgcctagttctgatgatgaggccacagctgactcccagcacagtactccacccaagaaaaagagaaaagtggaagacccaaaggatttcccctctgaactcttgtccttcttgtctcatgcagtgttctcaaataggaccctggcttgctttgctatctacactactaaggagaaggcagctctcttgtacaagaaaatcatggaaaagtattctgtcacctttatttccaggcacaactcctataatcataatattctctttttcttgacaccccataggcatagggtgagtgcaattaacaactatgctcagaagttgtgtactttctccttcctgatctgtaagggtgtgaataaggagtatctcatgtattcagccctgaccagagacccctttagtgtgattgaagaatccctgcctggtgggctcaaggagcatgatttcaacccagaagaggctgaagaaacaaaacaggtgagctggaagcttgtgactgaatatgcaatggagacaaagtgtgatgatgtcctgctcctcctgggaatgtacctggaatttcagtatagctttgaaatgtgtctgaaatgtatcaaaaaggaacagccttctcattataagtatcatgaaaagcactatgccaatgcagctatatttgcagattctaaaaaccagaaaaccatttgtcagcaagctgttgacacagttctggccaagaaaagagtagactctctccagcttaccagggagcagatgttgacaaataggttcaatgaccttctggacagaatggacataatgtttggctcaactggatctgcagatatagaggagtggatggctggagtggcctggctgcactgtctcctccctaaaatgagaagtgtagtctatgacttccttaagtgtatggtctataatatccctaaaaagagatactggttgttcaagggacccattgattcagggaaaactacccttgctgctgcacttctggaactctgtggtgggaaagctctcaatgtcaacctgccacttgatagactcaactttgagctgggggtggcaattgatcagtttttggtagtgtttgaagatgtgaaaggtacaggaggagagtccagggatttgcctagtggccaaggcatcaacaatctggacaacctcagagactacctggatgggtctgtaaaggtcaaccttgaaaaaaagcatctcaacaagaggactcaaatatttccacctggaatagtcactatgaatgaatattcagtgcccaagaccctccaggctagatttgtcaagcaaattgatttcagacctaaagattatctgaaacattgtttggagaggagtgagttcctccttgagaaaaggattattcagtcaggaatagcactgcttcttatgctgatatggtatagaccagtggctgagtttgcccaaagcattcagagtagaatagttgagtggaaagaaaggcttgacaaggagttttctctttcagtatatcaaaagatgaagttcaatgtggctatgggtattggagtgcttgattggttgagaaacagtgatgatgatgatgaagattctcaggaaaatgctgataaaaatgaggatgggggagagaagaatatggaagattctggtcatgaaactggcattgatagtcagagccaggggagtttccaggctccacagagctcccaaagtgtccatgaccacaaccagccttaccatatatgcagaggttttacttgtttcaagaaacctcccactccccctccagaacctgaaacatgagcggccgcgactctagatcataatcagccataccacatttgtagaggttttacttgctttaaaaaacctcccacacctccccctgaacctgaaacataaaatgaatgcaattgttgttgttaacttgtttattgcagcttataatggttacaaataaagcaatagcatcacaaatttcacaaataaagcatttttttcactgcattctagttgtggtttgtccaaactcatcaatgtatcttaaggcgtaaattgtaagcgttaatattttgttaaaattcgcgttaaatttttgttaaatcagctcattttttaaccaataggccgaaatcggcaaaatcccttataaatcaaaagaatagaccgagatagggttgagtgttgttccagtttggaacaagagtccactattaaagaacgtggactccaacgtcaaagggcgaaaaaccgtctatcagggcgatggcccactacgtgaaccatcaccctaatcaagttttttggggtcgaggtgccgtaaagcactaaatcggaaccctaaagggagcccccgatttagagcttgacggggaaagccggcgaacgtggcgagaaaggaagggaagaaagcgaaaggagcgggcgctagggcgctggcaagtgtagcggtcacgctgcgcgtaaccaccacacccgccgcgcttaatgcgccgctacagggcgcgtcaggtggcacttttcggggaaatgtgcgcggaacccctatttgtttatttttctaaatacattcaaatatgtatccgctcatgagacaataaccctgataaatgcttcaataatattgaaaaaggaagagtcctgaggcggaaagaaccagctgtggaatgtgtgtcagttagggtgtggaaagtccccaggctccccagcaggcagaagtatgcaaagcatgcatctcaattagtcagcaaccaggtgtggaaagtccccaggctccccagcaggcagaagtatgcaaagcatgcatctcaattagtcagcaaccatagtcccgcccctaactccgcccatcccgcccctaactccgcccagttccgcccattctccgccccatggctgactaattttttttatttatgcagaggccgaggccgcctcggcctctgagctattccagaagtagtgaggaggcttttttggaggcctaggcttttgcaaagatcgatcaagagacaggatgaggatcgtttcgcatgattgaacaagatggattgcacgcaggttctccggccgcttgggtggagaggctattcggctatgactgggcacaacagacaatcggctgctctgatgccgccgtgttccggctgtcagcgcaggggcgcccggttctttttgtcaagaccgacctgtccggtgccctgaatgaactgcaagacgaggcagcgcggctatcgtggctggccacgacgggcgttccttgcgcagctgtgctcgacgttgtcactgaagcgggaagggactggctgctattgggcgaagtgccggggcaggatctcctgtcatctcaccttgctcctgccgagaaagtatccatcatggctgatgcaatgcggcggctgcatacgcttgatccggctacctgcccattcgaccaccaagcgaaacatcgcatcgagcgagcacgtactcggatggaagccggtcttgtcgatcaggatgatctggacgaagagcatcaggggctcgcgccagccgaactgttcgccaggctcaaggcgagcatgcccgacggcgaggatctcgtcgtgacccatggcgatgcctgcttgccgaatatcatggtggaaaatggccgcttttctggattcatcgactgtggccggctgggtgtggcggaccgctatcaggacatagcgttggctacccgtgatattgctgaagagcttggcggcgaatgggctgaccgcttcctcgtgctttacggtatcgccgctcccgattcgcagcgcatcgccttctatcgccttcttgacgagttcttctgagcgggactctggggttcgaaatgaccgaccaagcgacgcccaacctgccatcacgagatttcgattccaccgccgccttctatgaaaggttgggcttcggaatcgttttccgggacgccggctggatgatcctccagcgcggggatctcatgctggagttcttcgcccaccctagggggaggctaactgaaacacggaaggagacaataccggaaggaacccgcgctatgacggcaataaaaagacagaataaaacgcacggtgttgggtcgtttgttcataaacgcggggttcggtcccagggctggcactctgtcgataccccaccgagaccccattggggccaatacgcccgcgtttcttccttttccccaccccaccccccaagttcgggtgaaggcccagggctcgcagccaacgtcggggcggcaggccctgccatagcctcaggttactcatatatactttagattgatttaaaacttcatttttaatttaaaaggatctaggtgaagatcctttttgataatctcatgaccaaaatcccttaacgtgagttttcgttccactgagcgtcagaccccgtagaaaagatcaaaggatcttcttgagatcctttttttctgcgcgtaatctgctgcttgcaaacaaaaaaaccaccgctaccagcggtggtttgtttgccggatcaagagctaccaactctttttccgaaggtaactggcttcagcagagcgcagataccaaatactgtccttctagtgtagccgtagttaggccaccacttcaagaactctgtagcaccgcctacatacctcgctctgctaatcctgttaccagtggctgctgccagtggcgataagtcgtgtcttaccgggttggactcaagacgatagttaccggataaggcgcagcggtcgggctgaacggggggttcgtgcacacagcccagcttggagcgaacgacctacaccgaactgagatacctacagcgtgagctatgagaaagcgccacgcttcccgaagggagaaaggcggacaggtatccggtaagcggcagggtcggaacaggagagcgcacgagggagcttccagggggaaacgcctggtatctttatagtcctgtcgggtttcgccacctctgacttgagcgtcgatttttgtgatgctcgtcaggggggcggagcctatggaaaaacgccagcaacgcggcctttttacggttcctggccttttgctggccttttgctcacatgttctttcctgcgttatcccctgattctgtggataaccgtattaccgccatgcat

SEQ ID NO: 708 - DNA, 7377 bp, Artificial Sequence
  pCzGFP-I-T(E107L/E108L)
tagttattaatagtaatcaattacggggtcattagttcatagcccatatatggagttccgcgttacataacttacggtaaatggcccgcctggctgaccgcccaacgacccccgcccattgacgtcaataatgacgtatgttcccatagtaacgccaatagggactttccattgacgtcaatgggtggagtatttacggtaaactgcccacttggcagtacatcaagtgtatcatatgccaagtacgccccctattgacgtcaatgacggtaaatggcccgcctggcattatgcccagtacatgaccttatgggactttcctacttggcagtacatctacgtattagtcatcgctattaccatggtgatgcggttttggcagtacatcaatgggcgtggatagcggtttgactcacggggatttccaagtctccaccccattgacgtcaatgggagtttgttttggcaccaaaatcaacgggactttccaaaatgtcgtaacaactccgccccattgacgcaaatgggcggtaggcgtgtacggtgggaggtctatataagcagagctggtttagtgaaccgtcagatccgctagctagaccatggtgagcaagggagaggaactctttacaggtgtggtcccaattctggtggagctggatggagatgtgaatgggcacaaattttctgtcagtggagagggagagggggatgctacctatggcaaactgactctgaagttcatctgcactactggcaagctgcctgtgccatggccaactctggtgacaaccctcacctatggagtccagtgcttttccagatatcctgaccacatgaaacagcatgactttttcaaatctgcaatgcctgagggctatgtgcaagagagaactatctttttcaaggatgatgggaactataagactagggctgaggtgaaatttgaaggagacaccctggtcaataggattgagctcaaggggattgacttcaaggaggatggcaacattctgggccataagctggagtataattacaattcccacaatgtctacattatggctgacaagcagaagaatggcattaaggtcaacttcaagattagacacaacatagaggatggatctgtgcagctggctgaccattaccagcagaatacacctattggggatgggccagtgctgctccctgacaatcactatctgagcacccaatctgctttgtctaaagatcctaatgaaaagagagatcacatggtgctgctggagtttgtaactgctgcaggaattaccttgggtatggatgaactctataagtaaggatccgcccctctccctcccccccccctaacgttactggccgaagccgcttggaataaggccggtgtgcgtttgtctatatgttattttccaccatattgccgtcttttggcaatgtgagggcccggaaacctggccctgtcttcttgacgagcattcctaggggtctttcccctctcgccaaaggaatgcaaggtctgttgaatgtcgtgaaggaagcagttcctctggaagcttcttgaagacaaacaacgtctgtagcgaccctttgcaggcagcggaaccccccacctggcgacaggtgcctctgcggccaaaagccacgtgtataagatacacctgcaaaggcggcacaaccccagtgccacgttgtgagttggatagttgtggaaagagtcaaatggctctcctcaagcgtattcaacaaggggctgaaggatgcccagaaggtaccccattgtatgggatctgatctggggcctcggtgcacatgctttacatgtgtttagtcgaggttaaaaaaacgtctaggccccccgaaccacggggacgtggttttcctttgaaaaacacgatgataatatggccacaaccatggacaaagtgctgaatagggaggaaagtctgcaactgatggatctgttgggacttgagaggtctgcatggggtaatatcccacttatgaggaaagcatacctgaagaagtgtaaagagttccatcctgacaaaggtggagatgaagagaagatgaaaaagatgaacacactgtataagaaaatggaagatggtgtaaagtatgctcaccagccagattttggaggtttttgggatgccacagagatacctacttatggtacagatgagtgggaacagtggtggaatgcatttaatgaagagaatttgttttgctctctgttaatgcctagttctgatgatgaggccacagctgactcccagcacagtactccacccaagaaaaagagaaaagtggaagacccaaaggatttcccctctgaactcttgtccttcttgtctcatgcagtgttctcaaataggaccctggcttgctttgctatctacactactaaggagaaggcagctctcttgtacaagaaaatcatggaaaagtattctgtcacctttatttccaggcacaactcctataatcataatattctctttttcttgacaccccataggcatagggtgagtgcaattaacaactatgctcagaagttgtgtactttctccttcctgatctgtaagggtgtgaataaggagtatctcatgtattcagccctgaccagagacccctttagtgtgattgaagaatccctgcctggtgggctcaaggagcatgatttcaacccagaagaggctgaagaaacaaaacaggtgagctggaagcttgtgactgaatatgcaatggagacaaagtgtgatgatgtcctgctcctcctgggaatgtacctggaatttcagtatagctttgaaatgtgtctgaaatgtatcaaaaaggaacagccttctcattataagtatcatgaaaagcactatgccaatgcagctatatttgcagattctaaaaaccagaaaaccatttgtcagcaagctgttgacacagttctggccaagaaaagagtagactctctccagcttaccagggagcagatgttgacaaataggttcaatgaccttctggacagaatggacataatgtttggctcaactggatctgcagatatagaggagtggatggctggagtggcctggctgcactgtctcctccctaaaatggacagtgtagtctatgacttccttaagtgtatggtctataatatccctaaaaagagatactggttgttcaagggacccattgattcagggaaaactacccttgctgctgcacttctggaactctgtggtgggaaagctctcaatgtcaacctgccacttgatagactcaactttgagctgggggtggcaattgatcagtttttggtagtgtttgaagatgtgaaaggtacaggaggagagtccagggatttgcctagtggccaaggcatcaacaatctggacaacctcagagactacctggatgggtctgtaaaggtcaaccttgaaaaaaagcatctcaacaagaggactcaaatatttccacctggaatagtcactatgaatgaatattcagtgcccaagaccctccaggctagatttgtcaagcaaattgatttcagacctaaagattatctgaaacattgtttggagaggagtgagttcctccttgagaaaaggattattcagtcaggaatagcactgcttcttatgctgatatggtatagaccagtggctgagtttgcccaaagcattcagagtagaatagttgagtggaaagaaaggcttgacaaggagttttctctttcagtatatcaaaagatgaagttcaatgtggctatgggtattggagtgcttgattggttgagaaacagtgatgatgatgatgaagattctcaggaaaatgctgataaaaatgaggatgggggagagaagaatatggaagattctggtcatgaaactggcattgatagtcagagccaggggagtttccaggctccacagagctcccaaagtgtccatgaccacaaccagccttaccatatatgcagaggttttacttgtttcaagaaacctcccactccccctccagaacctgaaacatgagcggccgcgactctagatcataatcagccataccacatttgtagaggttttacttgctttaaaaaacctcccacacctccccctgaacctgaaacataaaatgaatgcaattgttgttgttaacttgtttattgcagcttataatggttacaaataaagcaatagcatcacaaatttcacaaataaagcatttttttcactgcattctagttgtggtttgtccaaactcatcaatgtatcttaaggcgtaaattgtaagcgttaatattttgttaaaattcgcgttaaatttttgttaaatcagctcattttttaaccaataggccgaaatcggcaaaatcccttataaatcaaaagaatagaccgagatagggttgagtgttgttccagtttggaacaagagtccactattaaagaacgtggactccaacgtcaaagggcgaaaaaccgtctatcagggcgatggcccactacgtgaaccatcaccctaatcaagttttttggggtcgaggtgccgtaaagcactaaatcggaaccctaaagggagcccccgatttagagcttgacggggaaagccggcgaacgtggcgagaaaggaagggaagaaagcgaaaggagcgggcgctagggcgctggcaagtgtagcggtcacgctgcgcgtaaccaccacacccgccgcgcttaatgcgccgctacagggcgcgtcaggtggcacttttcggggaaatgtgcgcggaacccctatttgtttatttttctaaatacattcaaatatgtatccgctcatgagacaataaccctgataaatgcttcaataatattgaaaaaggaagagtcctgaggcggaaagaaccagctgtggaatgtgtgtcagttagggtgtggaaagtccccaggctccccagcaggcagaagtatgcaaagcatgcatctcaattagtcagcaaccaggtgtggaaagtccccaggctccccagcaggcagaagtatgcaaagcatgcatctcaattagtcagcaaccatagtcccgcccctaactccgcccatcccgcccctaactccgcccagttccgcccattctccgccccatggctgactaattttttttatttatgcagaggccgaggccgcctcggcctctgagctattccagaagtagtgaggaggcttttttggaggcctaggcttttgcaaagatcgatcaagagacaggatgaggatcgtttcgcatgattgaacaagatggattgcacgcaggttctccggccgcttgggtggagaggctattcggctatgactgggcacaacagacaatcggctgctctgatgccgccgtgttccggctgtcagcgcaggggcgcccggttctttttgtcaagaccgacctgtccggtgccctgaatgaactgcaagacgaggcagcgcggctatcgtggctggccacgacgggcgttccttgcgcagctgtgctcgacgttgtcactgaagcgggaagggactggctgctattgggcgaagtgccggggcaggatctcctgtcatctcaccttgctcctgccgagaaagtatccatcatggctgatgcaatgcggcggctgcatacgcttgatccggctacctgcccattcgaccaccaagcgaaacatcgcatcgagcgagcacgtactcggatggaagccggtcttgtcgatcaggatgatctggacgaagagcatcaggggctcgcgccagccgaactgttcgccaggctcaaggcgagcatgcccgacggcgaggatctcgtcgtgacccatggcgatgcctgcttgccgaatatcatggtggaaaatggccgcttttctggattcatcgactgtggccggctgggtgtggcggaccgctatcaggacatagcgttggctacccgtgatattgctgaagagcttggcggcgaatgggctgaccgcttcctcgtgctttacggtatcgccgctcccgattcgcagcgcatcgccttctatcgccttcttgacgagttcttctgagcgggactctggggttcgaaatgaccgaccaagcgacgcccaacctgccatcacgagatttcgattccaccgccgccttctatgaaaggttgggcttcggaatcgttttccgggacgccggctggatgatcctccagcgcggggatctcatgctggagttcttcgcccaccctagggggaggctaactgaaacacggaaggagacaataccggaaggaacccgcgctatgacggcaataaaaagacagaataaaacgcacggtgttgggtcgtttgttcataaacgcggggttcggtcccagggctggcactctgtcgataccccaccgagaccccattggggccaatacgcccgcgtttcttccttttccccaccccaccccccaagttcgggtgaaggcccagggctcgcagccaacgtcggggcggcaggccctgccatagcctcaggttactcatatatactttagattgatttaaaacttcatttttaatttaaaaggatctaggtgaagatcctttttgataatctcatgaccaaaatcccttaacgtgagttttcgttccactgagcgtcagaccccgtagaaaagatcaaaggatcttcttgagatcctttttttctgcgcgtaatctgctgcttgcaaacaaaaaaaccaccgctaccagcggtggtttgtttgccggatcaagagctaccaactctttttccgaaggtaactggcttcagcagagcgcagataccaaatactgtccttctagtgtagccgtagttaggccaccacttcaagaactctgtagcaccgcctacatacctcgctctgctaatcctgttaccagtggctgctgccagtggcgataagtcgtgtcttaccgggttggactcaagacgatagttaccggataaggcgcagcggtcgggctgaacggggggttcgtgcacacagcccagcttggagcgaacgacctacaccgaactgagatacctacagcgtgagctatgagaaagcgccacgcttcccgaagggagaaaggcggacaggtatccggtaagcggcagggtcggaacaggagagcgcacgagggagcttccagggggaaacgcctggtatctttatagtcctgtcgggtttcgccacctctgacttgagcgtcgatttttgtgatgctcgtcaggggggcggagcctatggaaaaacgccagcaacgcggcctttttacggttcctggccttttgctggccttttgctcacatgttctttcctgcgttatcccctgattctgtggataaccgtattaccgccatgcat

SEQ ID NO: 709 - DNA, 7377 bp, Artificial Sequence
  pCzGFP-I-T(E107L/E108L/D402R)
tagttattaatagtaatcaattacggggtcattagttcatagcccatatatggagttccgcgttacataacttacggtaaatggcccgcctggctgaccgcccaacgacccccgcccattgacgtcaataatgacgtatgttcccatagtaacgccaatagggactttccattgacgtcaatgggtggagtatttacggtaaactgcccacttggcagtacatcaagtgtatcatatgccaagtacgccccctattgacgtcaatgacggtaaatggcccgcctggcattatgcccagtacatgaccttatgggactttcctacttggcagtacatctacgtattagtcatcgctattaccatggtgatgcggttttggcagtacatcaatgggcgtggatagcggtttgactcacggggatttccaagtctccaccccattgacgtcaatgggagtttgttttggcaccaaaatcaacgggactttccaaaatgtcgtaacaactccgccccattgacgcaaatgggcggtaggcgtgtacggtgggaggtctatataagcagagctggtttagtgaaccgtcagatccgctagctagaccatggtgagcaagggagaggaactctttacaggtgtggtcccaattctggtggagctggatggagatgtgaatgggcacaaattttctgtcagtggagagggagagggggatgctacctatggcaaactgactctgaagttcatctgcactactggcaagctgcctgtgccatggccaactctggtgacaaccctcacctatggagtccagtgcttttccagatatcctgaccacatgaaacagcatgactttttcaaatctgcaatgcctgagggctatgtgcaagagagaactatctttttcaaggatgatgggaactataagactagggctgaggtgaaatttgaaggagacaccctggtcaataggattgagctcaaggggattgacttcaaggaggatggcaacattctgggccataagctggagtataattacaattcccacaatgtctacattatggctgacaagcagaagaatggcattaaggtcaacttcaagattagacacaacatagaggatggatctgtgcagctggctgaccattaccagcagaatacacctattggggatgggccagtgctgctccctgacaatcactatctgagcacccaatctgctttgtctaaagatcctaatgaaaagagagatcacatggtgctgctggagtttgtaactgctgcaggaattaccttgggtatggatgaactctataagtaaggatccgcccctctccctcccccccccctaacgttactggccgaagccgcttggaataaggccggtgtgcgtttgtctatatgttattttccaccatattgccgtcttttggcaatgtgagggcccggaaacctggccctgtcttcttgacgagcattcctaggggtctttcccctctcgccaaaggaatgcaaggtctgttgaatgtcgtgaaggaagcagttcctctggaagcttcttgaagacaaacaacgtctgtagcgaccctttgcaggcagcggaaccccccacctggcgacaggtgcctctgcggccaaaagccacgtgtataagatacacctgcaaaggcggcacaaccccagtgccacgttgtgagttggatagttgtggaaagagtcaaatggctctcctcaagcgtattcaacaaggggctgaaggatgcccagaaggtaccccattgtatgggatctgatctggggcctcggtgcacatgctttacatgtgtttagtcgaggttaaaaaaacgtctaggccccccgaaccacggggacgtggttttcctttgaaaaacacgatgataatatggccacaaccatggacaaagtgctgaatagggaggaaagtctgcaactgatggatctgttgggacttgagaggtctgcatggggtaatatcccacttatgaggaaagcatacctgaagaagtgtaaagagttccatcctgacaaaggtggagatgaagagaagatgaaaaagatgaacacactgtataagaaaatggaagatggtgtaaagtatgctcaccagccagattttggaggtttttgggatgccacagagatacctacttatggtacagatgagtgggaacagtggtggaatgcatttaatgaagagaatttgttttgctctctgttaatgcctagttctgatgatgaggccacagctgactcccagcacagtactccacccaagaaaaagagaaaagtggaagacccaaaggatttcccctctgaactcttgtccttcttgtctcatgcagtgttctcaaataggaccctggcttgctttgctatctacactactaaggagaaggcagctctcttgtacaagaaaatcatggaaaagtattctgtcacctttatttccaggcacaactcctataatcataatattctctttttcttgacaccccataggcatagggtgagtgcaattaacaactatgctcagaagttgtgtactttctccttcctgatctgtaagggtgtgaataaggagtatctcatgtattcagccctgaccagagacccctttagtgtgattgaagaatccctgcctggtgggctcaaggagcatgatttcaacccagaagaggctgaagaaacaaaacaggtgagctggaagcttgtgactgaatatgcaatggagacaaagtgtgatgatgtcctgctcctcctgggaatgtacctggaatttcagtatagctttgaaatgtgtctgaaatgtatcaaaaaggaacagccttctcattataagtatcatgaaaagcactatgccaatgcagctatatttgcagattctaaaaaccagaaaaccatttgtcagcaagctgttgacacagttctggccaagaaaagagtagactctctccagcttaccagggagcagatgttgacaaataggttcaatgaccttctggacagaatggacataatgtttggctcaactggatctgcagatatagaggagtggatggctggagtggcctggctgcactgtctcctccctaaaatgagaagtgtagtctatgacttccttaagtgtatggtctataatatccctaaaaagagatactggttgttcaagggacccattgattcagggaaaactacccttgctgctgcacttctggaactctgtggtgggaaagctctcaatgtcaacctgccacttgatagactcaactttgagctgggggtggcaattgatcagtttttggtagtgtttgaagatgtgaaaggtacaggaggagagtccagggatttgcctagtggccaaggcatcaacaatctggacaacctcagagactacctggatgggtctgtaaaggtcaaccttgaaaaaaagcatctcaacaagaggactcaaatatttccacctggaatagtcactatgaatgaatattcagtgcccaagaccctccaggctagatttgtcaagcaaattgatttcagacctaaagattatctgaaacattgtttggagaggagtgagttcctccttgagaaaaggattattcagtcaggaatagcactgcttcttatgctgatatggtatagaccagtggctgagtttgcccaaagcattcagagtagaatagttgagtggaaagaaaggcttgacaaggagttttctctttcagtatatcaaaagatgaagttcaatgtggctatgggtattggagtgcttgattggttgagaaacagtgatgatgatgatgaagattctcaggaaaatgctgataaaaatgaggatgggggagagaagaatatggaagattctggtcatgaaactggcattgatagtcagagccaggggagtttccaggctccacagagctcccaaagtgtccatgaccacaaccagccttaccatatatgcagaggttttacttgtttcaagaaacctcccactccccctccagaacctgaaacatgagcggccgcgactctagatcataatcagccataccacatttgtagaggttttacttgctttaaaaaacctcccacacctccccctgaacctgaaacataaaatgaatgcaattgttgttgttaacttgtttattgcagcttataatggttacaaataaagcaatagcatcacaaatttcacaaataaagcatttttttcactgcattctagttgtggtttgtccaaactcatcaatgtatcttaaggcgtaaattgtaagcgttaatattttgttaaaattcgcgttaaatttttgttaaatcagctcattttttaaccaataggccgaaatcggcaaaatcccttataaatcaaaagaatagaccgagatagggttgagtgttgttccagtttggaacaagagtccactattaaagaacgtggactccaacgtcaaagggcgaaaaaccgtctatcagggcgatggcccactacgtgaaccatcaccctaatcaagttttttggggtcgaggtgccgtaaagcactaaatcggaaccctaaagggagcccccgatttagagcttgacggggaaagccggcgaacgtggcgagaaaggaagggaagaaagcgaaaggagcgggcgctagggcgctggcaagtgtagcggtcacgctgcgcgtaaccaccacacccgccgcgcttaatgcgccgctacagggcgcgtcaggtggcacttttcggggaaatgtgcgcggaacccctatttgtttatttttctaaatacattcaaatatgtatccgctcatgagacaataaccctgataaatgcttcaataatattgaaaaaggaagagtcctgaggcggaaagaaccagctgtggaatgtgtgtcagttagggtgtggaaagtccccaggctccccagcaggcagaagtatgcaaagcatgcatctcaattagtcagcaaccaggtgtggaaagtccccaggctccccagcaggcagaagtatgcaaagcatgcatctcaattagtcagcaaccatagtcccgcccctaactccgcccatcccgcccctaactccgcccagttccgcccattctccgccccatggctgactaattttttttatttatgcagaggccgaggccgcctcggcctctgagctattccagaagtagtgaggaggcttttttggaggcctaggcttttgcaaagatcgatcaagagacaggatgaggatcgtttcgcatgattgaacaagatggattgcacgcaggttctccggccgcttgggtggagaggctattcggctatgactgggcacaacagacaatcggctgctctgatgccgccgtgttccggctgtcagcgcaggggcgcccggttctttttgtcaagaccgacctgtccggtgccctgaatgaactgcaagacgaggcagcgcggctatcgtggctggccacgacgggcgttccttgcgcagctgtgctcgacgttgtcactgaagcgggaagggactggctgctattgggcgaagtgccggggcaggatctcctgtcatctcaccttgctcctgccgagaaagtatccatcatggctgatgcaatgcggcggctgcatacgcttgatccggctacctgcccattcgaccaccaagcgaaacatcgcatcgagcgagcacgtactcggatggaagccggtcttgtcgatcaggatgatctggacgaagagcatcaggggctcgcgccagccgaactgttcgccaggctcaaggcgagcatgcccgacggcgaggatctcgtcgtgacccatggcgatgcctgcttgccgaatatcatggtggaaaatggccgcttttctggattcatcgactgtggccggctgggtgtggcggaccgctatcaggacatagcgttggctacccgtgatattgctgaagagcttggcggcgaatgggctgaccgcttcctcgtgctttacggtatcgccgctcccgattcgcagcgcatcgccttctatcgccttcttgacgagttcttctgagcgggactctggggttcgaaatgaccgaccaagcgacgcccaacctgccatcacgagatttcgattccaccgccgccttctatgaaaggttgggcttcggaatcgttttccgggacgccggctggatgatcctccagcgcggggatctcatgctggagttcttcgcccaccctagggggaggctaactgaaacacggaaggagacaataccggaaggaacccgcgctatgacggcaataaaaagacagaataaaacgcacggtgttgggtcgtttgttcataaacgcggggttcggtcccagggctggcactctgtcgataccccaccgagaccccattggggccaatacgcccgcgtttcttccttttccccaccccaccccccaagttcgggtgaaggcccagggctcgcagccaacgtcggggcggcaggccctgccatagcctcaggttactcatatatactttagattgatttaaaacttcatttttaatttaaaaggatctaggtgaagatcctttttgataatctcatgaccaaaatcccttaacgtgagttttcgttccactgagcgtcagaccccgtagaaaagatcaaaggatcttcttgagatcctttttttctgcgcgtaatctgctgcttgcaaacaaaaaaaccaccgctaccagcggtggtttgtttgccggatcaagagctaccaactctttttccgaaggtaactggcttcagcagagcgcagataccaaatactgtccttctagtgtagccgtagttaggccaccacttcaagaactctgtagcaccgcctacatacctcgctctgctaatcctgttaccagtggctgctgccagtggcgataagtcgtgtcttaccgggttggactcaagacgatagttaccggataaggcgcagcggtcgggctgaacggggggttcgtgcacacagcccagcttggagcgaacgacctacaccgaactgagatacctacagcgtgagctatgagaaagcgccacgcttcccgaagggagaaaggcggacaggtatccggtaagcggcagggtcggaacaggagagcgcacgagggagcttccagggggaaacgcctggtatctttatagtcctgtcgggtttcgccacctctgacttgagcgtcgatttttgtgatgctcgtcaggggggcggagcctatggaaaaacgccagcaacgcggcctttttacggttcctggccttttgctggccttttgctcacatgttctttcctgcgttatcccctgattctgtggataaccgtattaccgccatgcat

SEQ ID NO: 710 - DNA, 7377 bp, Artificial Sequence
  pCzGFP-I-T(E107L/E108L/D453S)
tagttattaatagtaatcaattacggggtcattagttcatagcccatatatggagttccgcgttacataacttacggtaaatggcccgcctggctgaccgcccaacgacccccgcccattgacgtcaataatgacgtatgttcccatagtaacgccaatagggactttccattgacgtcaatgggtggagtatttacggtaaactgcccacttggcagtacatcaagtgtatcatatgccaagtacgccccctattgacgtcaatgacggtaaatggcccgcctggcattatgcccagtacatgaccttatgggactttcctacttggcagtacatctacgtattagtcatcgctattaccatggtgatgcggttttggcagtacatcaatgggcgtggatagcggtttgactcacggggatttccaagtctccaccccattgacgtcaatgggagtttgttttggcaccaaaatcaacgggactttccaaaatgtcgtaacaactccgccccattgacgcaaatgggcggtaggcgtgtacggtgggaggtctatataagcagagctggtttagtgaaccgtcagatccgctagctagaccatggtgagcaagggagaggaactctttacaggtgtggtcccaattctggtggagctggatggagatgtgaatgggcacaaattttctgtcagtggagagggagagggggatgctacctatggcaaactgactctgaagttcatctgcactactggcaagctgcctgtgccatggccaactctggtgacaaccctcacctatggagtccagtgcttttccagatatcctgaccacatgaaacagcatgactttttcaaatctgcaatgcctgagggctatgtgcaagagagaactatctttttcaaggatgatgggaactataagactagggctgaggtgaaatttgaaggagacaccctggtcaataggattgagctcaaggggattgacttcaaggaggatggcaacattctgggccataagctggagtataattacaattcccacaatgtctacattatggctgacaagcagaagaatggcattaaggtcaacttcaagattagacacaacatagaggatggatctgtgcagctggctgaccattaccagcagaatacacctattggggatgggccagtgctgctccctgacaatcactatctgagcacccaatctgctttgtctaaagatcctaatgaaaagagagatcacatggtgctgctggagtttgtaactgctgcaggaattaccttgggtatggatgaactctataagtaaggatccgcccctctccctcccccccccctaacgttactggccgaagccgcttggaataaggccggtgtgcgtttgtctatatgttattttccaccatattgccgtcttttggcaatgtgagggcccggaaacctggccctgtcttcttgacgagcattcctaggggtctttcccctctcgccaaaggaatgcaaggtctgttgaatgtcgtgaaggaagcagttcctctggaagcttcttgaagacaaacaacgtctgtagcgaccctttgcaggcagcggaaccccccacctggcgacaggtgcctctgcggccaaaagccacgtgtataagatacacctgcaaaggcggcacaaccccagtgccacgttgtgagttggatagttgtggaaagagtcaaatggctctcctcaagcgtattcaacaaggggctgaaggatgcccagaaggtaccccattgtatgggatctgatctggggcctcggtgcacatgctttacatgtgtttagtcgaggttaaaaaaacgtctaggccccccgaaccacggggacgtggttttcctttgaaaaacacgatgataatatggccacaaccatggacaaagtgctgaatagggaggaaagtctgcaactgatggatctgttgggacttgagaggtctgcatggggtaatatcccacttatgaggaaagcatacctgaagaagtgtaaagagttccatcctgacaaaggtggagatgaagagaagatgaaaaagatgaacacactgtataagaaaatggaagatggtgtaaagtatgctcaccagccagattttggaggtttttgggatgccacagagatacctacttatggtacagatgagtgggaacagtggtggaatgcatttaatgaagagaatttgttttgctctctgttaatgcctagttctgatgatgaggccacagctgactcccagcacagtactccacccaagaaaaagagaaaagtggaagacccaaaggatttcccctctgaactcttgtccttcttgtctcatgcagtgttctcaaataggaccctggcttgctttgctatctacactactaaggagaaggcagctctcttgtacaagaaaatcatggaaaagtattctgtcacctttatttccaggcacaactcctataatcataatattctctttttcttgacaccccataggcatagggtgagtgcaattaacaactatgctcagaagttgtgtactttctccttcctgatctgtaagggtgtgaataaggagtatctcatgtattcagccctgaccagagacccctttagtgtgattgaagaatccctgcctggtgggctcaaggagcatgatttcaacccagaagaggctgaagaaacaaaacaggtgagctggaagcttgtgactgaatatgcaatggagacaaagtgtgatgatgtcctgctcctcctgggaatgtacctggaatttcagtatagctttgaaatgtgtctgaaatgtatcaaaaaggaacagccttctcattataagtatcatgaaaagcactatgccaatgcagctatatttgcagattctaaaaaccagaaaaccatttgtcagcaagctgttgacacagttctggccaagaaaagagtagactctctccagcttaccagggagcagatgttgacaaataggttcaatgaccttctggacagaatggacataatgtttggctcaactggatctgcagatatagaggagtggatggctggagtggcctggctgcactgtctcctccctaaaatggacagtgtagtctatgacttccttaagtgtatggtctataatatccctaaaaagagatactggttgttcaagggacccattgattcagggaaaactacccttgctgctgcacttctggaactctgtggtgggaaagctctcaatgtcaacctgtcacttgatagactcaactttgagctgggggtggcaattgatcagtttttggtagtgtttgaagatgtgaaaggtacaggaggagagtccagggatttgcctagtggccaaggcatcaacaatctggacaacctcagagactacctggatgggtctgtaaaggtcaaccttgaaaaaaagcatctcaacaagaggactcaaatatttccacctggaatagtcactatgaatgaatattcagtgcccaagaccctccaggctagatttgtcaagcaaattgatttcagacctaaagattatctgaaacattgtttggagaggagtgagttcctccttgagaaaaggattattcagtcaggaatagcactgcttcttatgctgatatggtatagaccagtggctgagtttgcccaaagcattcagagtagaatagttgagtggaaagaaaggcttgacaaggagttttctctttcagtatatcaaaagatgaagttcaatgtggctatgggtattggagtgcttgattggttgagaaacagtgatgatgatgatgaagattctcaggaaaatgctgataaaaatgaggatgggggagagaagaatatggaagattctggtcatgaaactggcattgatagtcagagccaggggagtttccaggctccacagagctcccaaagtgtccatgaccacaaccagccttaccatatatgcagaggttttacttgtttcaagaaacctcccactccccctccagaacctgaaacatgagcggccgcgactctagatcataatcagccataccacatttgtagaggttttacttgctttaaaaaacctcccacacctccccctgaacctgaaacataaaatgaatgcaattgttgttgttaacttgtttattgcagcttataatggttacaaataaagcaatagcatcacaaatttcacaaataaagcatttttttcactgcattctagttgtggtttgtccaaactcatcaatgtatcttaaggcgtaaattgtaagcgttaatattttgttaaaattcgcgttaaatttttgttaaatcagctcattttttaaccaataggccgaaatcggcaaaatcccttataaatcaaaagaatagaccgagatagggttgagtgttgttccagtttggaacaagagtccactattaaagaacgtggactccaacgtcaaagggcgaaaaaccgtctatcagggcgatggcccactacgtgaaccatcaccctaatcaagttttttggggtcgaggtgccgtaaagcactaaatcggaaccctaaagggagcccccgatttagagcttgacggggaaagccggcgaacgtggcgagaaaggaagggaagaaagcgaaaggagcgggcgctagggcgctggcaagtgtagcggtcacgctgcgcgtaaccaccacacccgccgcgcttaatgcgccgctacagggcgcgtcaggtggcacttttcggggaaatgtgcgcggaacccctatttgtttatttttctaaatacattcaaatatgtatccgctcatgagacaataaccctgataaatgcttcaataatattgaaaaaggaagagtcctgaggcggaaagaaccagctgtggaatgtgtgtcagttagggtgtggaaagtccccaggctccccagcaggcagaagtatgcaaagcatgcatctcaattagtcagcaaccaggtgtggaaagtccccaggctccccagcaggcagaagtatgcaaagcatgcatctcaattagtcagcaaccatagtcccgcccctaactccgcccatcccgcccctaactccgcccagttccgcccattctccgccccatggctgactaattttttttatttatgcagaggccgaggccgcctcggcctctgagctattccagaagtagtgaggaggcttttttggaggcctaggcttttgcaaagatcgatcaagagacaggatgaggatcgtttcgcatgattgaacaagatggattgcacgcaggttctccggccgcttgggtggagaggctattcggctatgactgggcacaacagacaatcggctgctctgatgccgccgtgttccggctgtcagcgcaggggcgcccggttctttttgtcaagaccgacctgtccggtgccctgaatgaactgcaagacgaggcagcgcggctatcgtggctggccacgacgggcgttccttgcgcagctgtgctcgacgttgtcactgaagcgggaagggactggctgctattgggcgaagtgccggggcaggatctcctgtcatctcaccttgctcctgccgagaaagtatccatcatggctgatgcaatgcggcggctgcatacgcttgatccggctacctgcccattcgaccaccaagcgaaacatcgcatcgagcgagcacgtactcggatggaagccggtcttgtcgatcaggatgatctggacgaagagcatcaggggctcgcgccagccgaactgttcgccaggctcaaggcgagcatgcccgacggcgaggatctcgtcgtgacccatggcgatgcctgcttgccgaatatcatggtggaaaatggccgcttttctggattcatcgactgtggccggctgggtgtggcggaccgctatcaggacatagcgttggctacccgtgatattgctgaagagcttggcggcgaatgggctgaccgcttcctcgtgctttacggtatcgccgctcccgattcgcagcgcatcgccttctatcgccttcttgacgagttcttctgagcgggactctggggttcgaaatgaccgaccaagcgacgcccaacctgccatcacgagatttcgattccaccgccgccttctatgaaaggttgggcttcggaatcgttttccgggacgccggctggatgatcctccagcgcggggatctcatgctggagttcttcgcccaccctagggggaggctaactgaaacacggaaggagacaataccggaaggaacccgcgctatgacggcaataaaaagacagaataaaacgcacggtgttgggtcgtttgttcataaacgcggggttcggtcccagggctggcactctgtcgataccccaccgagaccccattggggccaatacgcccgcgtttcttccttttccccaccccaccccccaagttcgggtgaaggcccagggctcgcagccaacgtcggggcggcaggccctgccatagcctcaggttactcatatatactttagattgatttaaaacttcatttttaatttaaaaggatctaggtgaagatcctttttgataatctcatgaccaaaatcccttaacgtgagttttcgttccactgagcgtcagaccccgtagaaaagatcaaaggatcttcttgagatcctttttttctgcgcgtaatctgctgcttgcaaacaaaaaaaccaccgctaccagcggtggtttgtttgccggatcaagagctaccaactctttttccgaaggtaactggcttcagcagagcgcagataccaaatactgtccttctagtgtagccgtagttaggccaccacttcaagaactctgtagcaccgcctacatacctcgctctgctaatcctgttaccagtggctgctgccagtggcgataagtcgtgtcttaccgggttggactcaagacgatagttaccggataaggcgcagcggtcgggctgaacggggggttcgtgcacacagcccagcttggagcgaacgacctacaccgaactgagatacctacagcgtgagctatgagaaagcgccacgcttcccgaagggagaaaggcggacaggtatccggtaagcggcagggtcggaacaggagagcgcacgagggagcttccagggggaaacgcctggtatctttatagtcctgtcgggtttcgccacctctgacttgagcgtcgatttttgtgatgctcgtcaggggggcggagcctatggaaaaacgccagcaacgcggcctttttacggttcctggccttttgctggccttttgctcacatgttctttcctgcgttatcccctgattctgtggataaccgtattaccgccatgcat

SEQ ID NO: 711 - DNA, 7377 bp, Artificial Sequence
  pCzGFP-I-T(E107L/E108L/V585R)
tagttattaatagtaatcaattacggggtcattagttcatagcccatatatggagttccgcgttacataacttacggtaaatggcccgcctggctgaccgcccaacgacccccgcccattgacgtcaataatgacgtatgttcccatagtaacgccaatagggactttccattgacgtcaatgggtggagtatttacggtaaactgcccacttggcagtacatcaagtgtatcatatgccaagtacgccccctattgacgtcaatgacggtaaatggcccgcctggcattatgcccagtacatgaccttatgggactttcctacttggcagtacatctacgtattagtcatcgctattaccatggtgatgcggttttggcagtacatcaatgggcgtggatagcggtttgactcacggggatttccaagtctccaccccattgacgtcaatgggagtttgttttggcaccaaaatcaacgggactttccaaaatgtcgtaacaactccgccccattgacgcaaatgggcggtaggcgtgtacggtgggaggtctatataagcagagctggtttagtgaaccgtcagatccgctagctagaccatggtgagcaagggagaggaactctttacaggtgtggtcccaattctggtggagctggatggagatgtgaatgggcacaaattttctgtcagtggagagggagagggggatgctacctatggcaaactgactctgaagttcatctgcactactggcaagctgcctgtgccatggccaactctggtgacaaccctcacctatggagtccagtgcttttccagatatcctgaccacatgaaacagcatgactttttcaaatctgcaatgcctgagggctatgtgcaagagagaactatctttttcaaggatgatgggaactataagactagggctgaggtgaaatttgaaggagacaccctggtcaataggattgagctcaaggggattgacttcaaggaggatggcaacattctgggccataagctggagtataattacaattcccacaatgtctacattatggctgacaagcagaagaatggcattaaggtcaacttcaagattagacacaacatagaggatggatctgtgcagctggctgaccattaccagcagaatacacctattggggatgggccagtgctgctccctgacaatcactatctgagcacccaatctgctttgtctaaagatcctaatgaaaagagagatcacatggtgctgctggagtttgtaactgctgcaggaattaccttgggtatggatgaactctataagtaaggatccgcccctctccctcccccccccctaacgttactggccgaagccgcttggaataaggccggtgtgcgtttgtctatatgttattttccaccatattgccgtcttttggcaatgtgagggcccggaaacctggccctgtcttcttgacgagcattcctaggggtctttcccctctcgccaaaggaatgcaaggtctgttgaatgtcgtgaaggaagcagttcctctggaagcttcttgaagacaaacaacgtctgtagcgaccctttgcaggcagcggaaccccccacctggcgacaggtgcctctgcggccaaaagccacgtgtataagatacacctgcaaaggcggcacaaccccagtgccacgttgtgagttggatagttgtggaaagagtcaaatggctctcctcaagcgtattcaacaaggggctgaaggatgcccagaaggtaccccattgtatgggatctgatctggggcctcggtgcacatgctttacatgtgtttagtcgaggttaaaaaaacgtctaggccccccgaaccacggggacgtggttttcctttgaaaaacacgatgataatatggccacaaccatggacaaagtgctgaatagggaggaaagtctgcaactgatggatctgttgggacttgagaggtctgcatggggtaatatcccacttatgaggaaagcatacctgaagaagtgtaaagagttccatcctgacaaaggtggagatgaagagaagatgaaaaagatgaacacactgtataagaaaatggaagatggtgtaaagtatgctcaccagccagattttggaggtttttgggatgccacagagatacctacttatggtacagatgagtgggaacagtggtggaatgcatttaatgaagagaatttgttttgctctctgttaatgcctagttctgatgatgaggccacagctgactcccagcacagtactccacccaagaaaaagagaaaagtggaagacccaaaggatttcccctctgaactcttgtccttcttgtctcatgcagtgttctcaaataggaccctggcttgctttgctatctacactactaaggagaaggcagctctcttgtacaagaaaatcatggaaaagtattctgtcacctttatttccaggcacaactcctataatcataatattctctttttcttgacaccccataggcatagggtgagtgcaattaacaactatgctcagaagttgtgtactttctccttcctgatctgtaagggtgtgaataaggagtatctcatgtattcagccctgaccagagacccctttagtgtgattgaagaatccctgcctggtgggctcaaggagcatgatttcaacccagaagaggctgaagaaacaaaacaggtgagctggaagcttgtgactgaatatgcaatggagacaaagtgtgatgatgtcctgctcctcctgggaatgtacctggaatttcagtatagctttgaaatgtgtctgaaatgtatcaaaaaggaacagccttctcattataagtatcatgaaaagcactatgccaatgcagctatatttgcagattctaaaaaccagaaaaccatttgtcagcaagctgttgacacagttctggccaagaaaagagtagactctctccagcttaccagggagcagatgttgacaaataggttcaatgaccttctggacagaatggacataatgtttggctcaactggatctgcagatatagaggagtggatggctggagtggcctggctgcactgtctcctccctaaaatggacagtgtagtctatgacttccttaagtgtatggtctataatatccctaaaaagagatactggttgttcaagggacccattgattcagggaaaactacccttgctgctgcacttctggaactctgtggtgggaaagctctcaatgtcaacctgccacttgatagactcaactttgagctgggggtggcaattgatcagtttttggtagtgtttgaagatgtgaaaggtacaggaggagagtccagggatttgcctagtggccaaggcatcaacaatctggacaacctcagagactacctggatgggtctgtaaaggtcaaccttgaaaaaaagcatctcaacaagaggactcaaatatttccacctggaatagtcactatgaatgaatattcagtgcccaagaccctccaggctagatttgtcaagcaaattgatttcagacctaaagattatctgaaacattgtttggagaggagtgagttcctccttgagaaaaggattattcagtcaggaatagcactgcttcttatgctgatatggtatagaccaagggctgagtttgcccaaagcattcagagtagaatagttgagtggaaagaaaggcttgacaaggagttttctctttcagtatatcaaaagatgaagttcaatgtggctatgggtattggagtgcttgattggttgagaaacagtgatgatgatgatgaagattctcaggaaaatgctgataaaaatgaggatgggggagagaagaatatggaagattctggtcatgaaactggcattgatagtcagagccaggggagtttccaggctccacagagctcccaaagtgtccatgaccacaaccagccttaccatatatgcagaggttttacttgtttcaagaaacctcccactccccctccagaacctgaaacatgagcggccgcgactctagatcataatcagccataccacatttgtagaggttttacttgctttaaaaaacctcccacacctccccctgaacctgaaacataaaatgaatgcaattgttgttgttaacttgtttattgcagcttataatggttacaaataaagcaatagcatcacaaatttcacaaataaagcatttttttcactgcattctagttgtggtttgtccaaactcatcaatgtatcttaaggcgtaaattgtaagcgttaatattttgttaaaattcgcgttaaatttttgttaaatcagctcattttttaaccaataggccgaaatcggcaaaatcccttataaatcaaaagaatagaccgagatagggttgagtgttgttccagtttggaacaagagtccactattaaagaacgtggactccaacgtcaaagggcgaaaaaccgtctatcagggcgatggcccactacgtgaaccatcaccctaatcaagttttttggggtcgaggtgccgtaaagcactaaatcggaaccctaaagggagcccccgatttagagcttgacggggaaagccggcgaacgtggcgagaaaggaagggaagaaagcgaaaggagcgggcgctagggcgctggcaagtgtagcggtcacgctgcgcgtaaccaccacacccgccgcgcttaatgcgccgctacagggcgcgtcaggtggcacttttcggggaaatgtgcgcggaacccctatttgtttatttttctaaatacattcaaatatgtatccgctcatgagacaataaccctgataaatgcttcaataatattgaaaaaggaagagtcctgaggcggaaagaaccagctgtggaatgtgtgtcagttagggtgtggaaagtccccaggctccccagcaggcagaagtatgcaaagcatgcatctcaattagtcagcaaccaggtgtggaaagtccccaggctccccagcaggcagaagtatgcaaagcatgcatctcaattagtcagcaaccatagtcccgcccctaactccgcccatcccgcccctaactccgcccagttccgcccattctccgccccatggctgactaattttttttatttatgcagaggccgaggccgcctcggcctctgagctattccagaagtagtgaggaggcttttttggaggcctaggcttttgcaaagatcgatcaagagacaggatgaggatcgtttcgcatgattgaacaagatggattgcacgcaggttctccggccgcttgggtggagaggctattcggctatgactgggcacaacagacaatcggctgctctgatgccgccgtgttccggctgtcagcgcaggggcgcccggttctttttgtcaagaccgacctgtccggtgccctgaatgaactgcaagacgaggcagcgcggctatcgtggctggccacgacgggcgttccttgcgcagctgtgctcgacgttgtcactgaagcgggaagggactggctgctattgggcgaagtgccggggcaggatctcctgtcatctcaccttgctcctgccgagaaagtatccatcatggctgatgcaatgcggcggctgcatacgcttgatccggctacctgcccattcgaccaccaagcgaaacatcgcatcgagcgagcacgtactcggatggaagccggtcttgtcgatcaggatgatctggacgaagagcatcaggggctcgcgccagccgaactgttcgccaggctcaaggcgagcatgcccgacggcgaggatctcgtcgtgacccatggcgatgcctgcttgccgaatatcatggtggaaaatggccgcttttctggattcatcgactgtggccggctgggtgtggcggaccgctatcaggacatagcgttggctacccgtgatattgctgaagagcttggcggcgaatgggctgaccgcttcctcgtgctttacggtatcgccgctcccgattcgcagcgcatcgccttctatcgccttcttgacgagttcttctgagcgggactctggggttcgaaatgaccgaccaagcgacgcccaacctgccatcacgagatttcgattccaccgccgccttctatgaaaggttgggcttcggaatcgttttccgggacgccggctggatgatcctccagcgcggggatctcatgctggagttcttcgcccaccctagggggaggctaactgaaacacggaaggagacaataccggaaggaacccgcgctatgacggcaataaaaagacagaataaaacgcacggtgttgggtcgtttgttcataaacgcggggttcggtcccagggctggcactctgtcgataccccaccgagaccccattggggccaatacgcccgcgtttcttccttttccccaccccaccccccaagttcgggtgaaggcccagggctcgcagccaacgtcggggcggcaggccctgccatagcctcaggttactcatatatactttagattgatttaaaacttcatttttaatttaaaaggatctaggtgaagatcctttttgataatctcatgaccaaaatcccttaacgtgagttttcgttccactgagcgtcagaccccgtagaaaagatcaaaggatcttcttgagatcctttttttctgcgcgtaatctgctgcttgcaaacaaaaaaaccaccgctaccagcggtggtttgtttgccggatcaagagctaccaactctttttccgaaggtaactggcttcagcagagcgcagataccaaatactgtccttctagtgtagccgtagttaggccaccacttcaagaactctgtagcaccgcctacatacctcgctctgctaatcctgttaccagtggctgctgccagtggcgataagtcgtgtcttaccgggttggactcaagacgatagttaccggataaggcgcagcggtcgggctgaacggggggttcgtgcacacagcccagcttggagcgaacgacctacaccgaactgagatacctacagcgtgagctatgagaaagcgccacgcttcccgaagggagaaaggcggacaggtatccggtaagcggcagggtcggaacaggagagcgcacgagggagcttccagggggaaacgcctggtatctttatagtcctgtcgggtttcgccacctctgacttgagcgtcgatttttgtgatgctcgtcaggggggcggagcctatggaaaaacgccagcaacgcggcctttttacggttcctggccttttgctggccttttgctcacatgttctttcctgcgttatcccctgattctgtggataaccgtattaccgccatgcat

SEQ ID NO: 712 - DNA, 7377 bp, Artificial Sequence
  pCzGFP-I-T(E107L/E108L/D604R)
  CDS (1917)...(4043): Large T-Antigen
tagttattaatagtaatcaattacggggtcattagttcatagcccatatatggagttccgcgttacataacttacggtaaatggcccgcctggctgaccgcccaacgacccccgcccattgacgtcaataatgacgtatgttcccatagtaacgccaatagggactttccattgacgtcaatgggtggagtatttacggtaaactgcccacttggcagtacatcaagtgtatcatatgccaagtacgccccctattgacgtcaatgacggtaaatggcccgcctggcattatgcccagtacatgaccttatgggactttcctacttggcagtacatctacgtattagtcatcgctattaccatggtgatgcggttttggcagtacatcaatgggcgtggatagcggtttgactcacggggatttccaagtctccaccccattgacgtcaatgggagtttgttttggcaccaaaatcaacgggactttccaaaatgtcgtaacaactccgccccattgacgcaaatgggcggtaggcgtgtacggtgggaggtctatataagcagagctggtttagtgaaccgtcagatccgctagctagaccatggtgagcaagggagaggaactctttacaggtgtggtcccaattctggtggagctggatggagatgtgaatgggcacaaattttctgtcagtggagagggagagggggatgctacctatggcaaactgactctgaagttcatctgcactactggcaagctgcctgtgccatggccaactctggtgacaaccctcacctatggagtccagtgcttttccagatatcctgaccacatgaaacagcatgactttttcaaatctgcaatgcctgagggctatgtgcaagagagaactatctttttcaaggatgatgggaactataagactagggctgaggtgaaatttgaaggagacaccctggtcaataggattgagctcaaggggattgacttcaaggaggatggcaacattctgggccataagctggagtataattacaattcccacaatgtctacattatggctgacaagcagaagaatggcattaaggtcaacttcaagattagacacaacatagaggatggatctgtgcagctggctgaccattaccagcagaatacacctattggggatgggccagtgctgctccctgacaatcactatctgagcacccaatctgctttgtctaaagatcctaatgaaaagagagatcacatggtgctgctggagtttgtaactgctgcaggaattaccttgggtatggatgaactctataagtaaggatccgcccctctccctcccccccccctaacgttactggccgaagccgcttggaataaggccggtgtgcgtttgtctatatgttattttccaccatattgccgtcttttggcaatgtgagggcccggaaacctggccctgtcttcttgacgagcattcctaggggtctttcccctctcgccaaaggaatgcaaggtctgttgaatgtcgtgaaggaagcagttcctctggaagcttcttgaagacaaacaacgtctgtagcgaccctttgcaggcagcggaaccccccacctggcgacaggtgcctctgcggccaaaagccacgtgtataagatacacctgcaaaggcggcacaaccccagtgccacgttgtgagttggatagttgtggaaagagtcaaatggctctcctcaagcgtattcaacaaggggctgaaggatgcccagaaggtaccccattgtatgggatctgatctggggcctcggtgcacatgctttacatgtgtttagtcgaggttaaaaaaacgtctaggccccccgaaccacggggacgtggttttcctttgaaaaacacgatgataatatggccacaaccatggacaaagtgctgaatagggaggaaagtctgcaactgatggatctgttgggacttgagaggtctgcatggggtaatatctcacttatgaggaaagcatacctgaagaagtgtaaagagttccatcctgacaaaggtggagatgaagagaagatgaaaaagatgaacacactgtataagaaaatggaagatggtgtaaagtatgctcaccagccagattttggaggtttttgggatgccacagagatacctacttatggtacagatgagtgggaacagtggtggaatgcatttaatgaagagaatttgttttgctctctgttaatgcctagttctgatgatgaggccacagctgactcccagcacagtactccacccaagaaaaagagaaaagtggaagacccaaaggatttcccctctgaactcttgtccttcttgtctcatgcagtgttctcaaataggaccctggcttgctttgctatctacactactaaggagaaggcagctctcttgtacaagaaaatcatggaaaagtattctgtcacctttatttccaggcacaactcctataatcataatattctctttttcttgacaccccataggcatagggtgagtgcaattaacaactatgctcagaagttgtgtactttctccttcctgatctgtaagggtgtgaataaggagtatctcatgtattcagccctgaccagagacccctttagtgtgattgaagaatccctgcctggtgggctcaaggagcatgatttcaacccagaagaggctgaagaaacaaaacaggtgagctggaagcttgtgactgaatatgcaatggagacaaagtgtgatgatgtcctgctcctcctgggaatgtacctggaatttcagtatagctttgaaatgtgtctgaaatgtatcaaaaaggaacagccttctcattataagtatcatgaaaagcactatgccaatgcagctatatttgcagattctaaaaaccagaaaaccatttgtcagcaagctgttgacacagttctggccaagaaaagagtagactctctccagcttaccagggagcagatgttgacaaataggttcaatgaccttctggacagaatggacataatgtttggctcaactggatctgcagatatagaggagtggatggctggagtggcctggctgcactgtctcctccctaaaatggacagtgtagtctatgacttccttaagtgtatggtctataatatccctaaaaagagatactggttgttcaagggacccattgattcagggaaaactacccttgctgctgcacttctggaactctgtggtgggaaagctctcaatgtcaacctgccacttgatagactcaactttgagctgggggtggcaattgatcagtttttggtagtgtttgaagatgtgaaaggtacaggaggagagtccagggatttgcctagtggccaaggcatcaacaatctggacaacctcagagactacctggatgggtctgtaaaggtcaaccttgaaaaaaagcatctcaacaagaggactcaaatatttccacctggaatagtcactatgaatgaatattcagtgcccaagaccctccaggctagatttgtcaagcaaattgatttcagacctaaagattatctgaaacattgtttggagaggagtgagttcctccttgagaaaaggattattcagtcaggaatagcactgcttcttatgctgatatggtatagaccagtggctgagtttgcccaaagcattcagagtagaatagttgagtggaaagaaaggcttagaaaggagttttctctttcagtatatcaaaagatgaagttcaatgtggctatgggtattggagtgcttgattggttgagaaacagtgatgatgatgatgaagattctcaggaaaatgctgataaaaatgaggatgggggagagaagaatatggaagattctggtcatgaaactggcattgatagtcagagccaggggagtttccaggctccacagagctcccaaagtgtccatgaccacaaccagccttaccatatatgcagaggttttacttgtttcaagaaacctcccactccccctccagaacctgaaacatgagcggccgcgactctagatcataatcagccataccacatttgtagaggttttacttgctttaaaaaacctcccacacctccccctgaacctgaaacataaaatgaatgcaattgttgttgttaacttgtttattgcagcttataatggttacaaataaagcaatagcatcacaaatttcacaaataaagcatttttttcactgcattctagttgtggtttgtccaaactcatcaatgtatcttaaggcgtaaattgtaagcgttaatattttgttaaaattcgcgttaaatttttgttaaatcagctcattttttaaccaataggccgaaatcggcaaaatcccttataaatcaaaagaatagaccgagatagggttgagtgttgttccagtttggaacaagagtccactattaaagaacgtggactccaacgtcaaagggcgaaaaaccgtctatcagggcgatggcccactacgtgaaccatcaccctaatcaagttttttggggtcgaggtgccgtaaagcactaaatcggaaccctaaagggagcccccgatttagagcttgacggggaaagccggcgaacgtggcgagaaaggaagggaagaaagcgaaaggagcgggcgctagggcgctggcaagtgtagcggtcacgctgcgcgtaaccaccacacccgccgcgcttaatgcgccgctacagggcgcgtcaggtggcacttttcggggaaatgtgcgcggaacccctatttgtttatttttctaaatacattcaaatatgtatccgctcatgagacaataaccctgataaatgcttcaataatattgaaaaaggaagagtcctgaggcggaaagaaccagctgtggaatgtgtgtcagttagggtgtggaaagtccccaggctccccagcaggcagaagtatgcaaagcatgcatctcaattagtcagcaaccaggtgtggaaagtccccaggctccccagcaggcagaagtatgcaaagcatgcatctcaattagtcagcaaccatagtcccgcccctaactccgcccatcccgcccctaactccgcccagttccgcccattctccgccccatggctgactaattttttttatttatgcagaggccgaggccgcctcggcctctgagctattccagaagtagtgaggaggcttttttggaggcctaggcttttgcaaagatcgatcaagagacaggatgaggatcgtttcgcatgattgaacaagatggattgcacgcaggttctccggccgcttgggtggagaggctattcggctatgactgggcacaacagacaatcggctgctctgatgccgccgtgttccggctgtcagcgcaggggcgcccggttctttttgtcaagaccgacctgtccggtgccctgaatgaactgcaagacgaggcagcgcggctatcgtggctggccacgacgggcgttccttgcgcagctgtgctcgacgttgtcactgaagcgggaagggactggctgctattgggcgaagtgccggggcaggatctcctgtcatctcaccttgctcctgccgagaaagtatccatcatggctgatgcaatgcggcggctgcatacgcttgatccggctacctgcccattcgaccaccaagcgaaacatcgcatcgagcgagcacgtactcggatggaagccggtcttgtcgatcaggatgatctggacgaagagcatcaggggctcgcgccagccgaactgttcgccaggctcaaggcgagcatgcccgacggcgaggatctcgtcgtgacccatggcgatgcctgcttgccgaatatcatggtggaaaatggccgcttttctggattcatcgactgtggccggctgggtgtggcggaccgctatcaggacatagcgttggctacccgtgatattgctgaagagcttggcggcgaatgggctgaccgcttcctcgtgctttacggtatcgccgctcccgattcgcagcgcatcgccttctatcgccttcttgacgagttcttctgagcgggactctggggttcgaaatgaccgaccaagcgacgcccaacctgccatcacgagatttcgattccaccgccgccttctatgaaaggttgggcttcggaatcgttttccgggacgccggctggatgatcctccagcgcggggatctcatgctggagttcttcgcccaccctagggggaggctaactgaaacacggaaggagacaataccggaaggaacccgcgctatgacggcaataaaaagacagaataaaacgcacggtgttgggtcgtttgttcataaacgcggggttcggtcccagggctggcactctgtcgataccccaccgagaccccattggggccaatacgcccgcgtttcttccttttccccaccccaccccccaagttcgggtgaaggcccagggctcgcagccaacgtcggggcggcaggccctgccatagcctcaggttactcatatatactttagattgatttaaaacttcatttttaatttaaaaggatctaggtgaagatcctttttgataatctcatgaccaaaatcccttaacgtgagttttcgttccactgagcgtcagaccccgtagaaaagatcaaaggatcttcttgagatcctttttttctgcgcgtaatctgctgcttgcaaacaaaaaaaccaccgctaccagcggtggtttgtttgccggatcaagagctaccaactctttttccgaaggtaactggcttcagcagagcgcagataccaaatactgtccttctagtgtagccgtagttaggccaccacttcaagaactctgtagcaccgcctacatacctcgctctgctaatcctgttaccagtggctgctgccagtggcgataagtcgtgtcttaccgggttggactcaagacgatagttaccggataaggcgcagcggtcgggctgaacggggggttcgtgcacacagcccagcttggagcgaacgacctacaccgaactgagatacctacagcgtgagctatgagaaagcgccacgcttcccgaagggagaaaggcggacaggtatccggtaagcggcagggtcggaacaggagagcgcacgagggagcttccagggggaaacgcctggtatctttatagtcctgtcgggtttcgccacctctgacttgagcgtcgatttttgtgatgctcgtcaggggggcggagcctatggaaaaacgccagcaacgcggcctttttacggttcctggccttttgctggccttttgctcacatgttctttcctgcgttatcccctgattctgtggataaccgtattaccgccatgcat

SEQ ID NO: 713 - DNA, 7254 bp, Artificial Sequence
  pCzGALV-I-zGFP
  CDS (603)...(2606): GALV
tagttattaatagtaatcaattacggggtcattagttcatagcccatatatggagttccgcgttacataacttacggtaaatggcccgcctggctgaccgcccaacgacccccgcccattgacgtcaataatgacgtatgttcccatagtaacgccaatagggactttccattgacgtcaatgggtggagtatttacggtaaactgcccacttggcagtacatcaagtgtatcatatgccaagtacgccccctattgacgtcaatgacggtaaatggcccgcctggcattatgcccagtacatgaccttatgggactttcctacttggcagtacatctacgtattagtcatcgctattaccatggtgatgcggttttggcagtacatcaatgggcgtggatagcggtttgactcacggggatttccaagtctccaccccattgacgtcaatgggagtttgttttggcaccaaaatcaacgggactttccaaaatgtcgtaacaactccgccccattgacgcaaatgggcggtaggcgtgtacggtgggaggtctatataagcagagctggtttagtgaaccgtcagatccgctagctagaccatggtcctgctgccaggctcaatgctgctgaccagcaatctccaccacctgagacaccagatgtcacctgggtcctggaagagacttatcattcttctgtcctgtgtgtttgggggtggaggcaccagcctgcaaaataagaacccacatcagcccatgaccctcacctggcaggtcctgagccagacaggtgatgttgtctgggataccaaagcagtccagcccccctggacttggtggcccaccttgaaacctgatgtctgtgccctggcagctagtctggagagctgggacatcccaggcactgatgtcagcagcagcaagagggttaggccacctgacagtgactacactgcagcctacaagcagatcacctggggagccattggctgctcctaccctagagctagaaccagaatggcctccagtaccttctatgtctgccctagagatggcagaactctgtctgaggccaggagatgtggtggactggaatccctctactgcaaagagtgggactgtgagactactggcacaggctattggttgtccaagtcatccaaggacttgatcactgtgaagtgggatcagaattcagagtggacccagaaatttcagcaatgccaccagacaggctggtgcaaccccttgaagattgactttacagataaggggaagctcagtaaagactggatcacaggcaaaacctggggactgaggttctatgtttctggccatccaggtgttcagttcaccatcagattgaaaatcaccaatatgccagctgtggcagtgggtcctgaccttgtgctggtggaacagggcccacccaggacatccttggccttgcctccacccctccctcccagggaagccccccctccaagcttgcctgactccaattctacagctctggctactagtgcccaaactcctactgtgaggaagaccattgtcacactcaatacaccccctccaactacaggagacaggttgtttgaccttgtgcaaggtgccttccttacacttaatgccaccaaccctggagccacagaaagttgttggctgtgcctggcaatgggtccaccctactatgaggcaattgcaagttctggtgaagtggcatatagcactgacctggatagatgtaggtgggggacccagggaaaactcacacttactgaagtgagtgggcatggcctgtgcattggaaaagtcccattcacacaccaacatctgtgcaaccaaacactctccatcaactcttctggtgaccaccagtacctgcttccaagcaaccacagctggtgggcctgcagcactgggctgaccccctgcctgagcacctctgtgttcaatcagacaagagatttctgtatccaggtgcagctcattcccagaatctactactatcctgaggaggtgctgctgcaagcctatgacaacagtcatcccaggactaagagggaagcagtgagtctcaccctggctgttctgctgggcctgggaatcacagctgggattggtacaggctcaacagcccttatcaagggccccattgacctgcagcaaggactgacttcccttcagattgcaattgatgctgatctgagagccctgcaggattctgtgtccaaactggaggacagccttacctctctctcagaagtggttcttcagaacaggagaggactggacttgctctttctcaaagagggagggctttgtgctgccctcaaggaggagtgttgcttttacattgatcattctggggctgttagagattcaatgaaaaagctcaaggagaaattggataaaaggcagctggaaagacagaagtctcaaaactggtatgaagggtggttcaacaatagtccttggttcactaccttgctgagcactattgctggcccactcttgctgctgttgctcctgctcatcctggggccctgtatcatcaacaagctggtgcagtttatcaatgacaggatcagtgcctgctgaggatccgcccctctccctcccccccccctaacgttactggccgaagccgcttggaataaggccggtgtgcgtttgtctatatgttattttccaccatattgccgtcttttggcaatgtgagggcccggaaacctggccctgtcttcttgacgagcattcctaggggtctttcccctctcgccaaaggaatgcaaggtctgttgaatgtcgtgaaggaagcagttcctctggaagcttcttgaagacaaacaacgtctgtagcgaccctttgcaggcagcggaaccccccacctggcgacaggtgcctctgcggccaaaagccacgtgtataagatacacctgcaaaggcggcacaaccccagtgccacgttgtgagttggatagttgtggaaagagtcaaatggctctcctcaagcgtattcaacaaggggctgaaggatgcccagaaggtaccccattgtatgggatctgatctggggcctcggtgcacatgctttacatgtgtttagtcgaggttaaaaaaacgtctaggccccccgaaccacggggacgtggttttcctttgaaaaacacgatgataatatggccacaaccatggtgagcaagggagaggaactctttacaggtgtggtcccaattctggtggagctggatggagatgtgaatgggcacaaattttctgtcagtggagagggagagggggatgctacctatggcaaactgactctgaagttcatctgcactactggcaagctgcctgtgccatggccaactctggtgacaaccctcacctatggagtccagtgcttttccagatatcctgaccacatgaaacagcatgactttttcaaatctgcaatgcctgagggctatgtgcaagagagaactatctttttcaaggatgatgggaactataagactagggctgaggtgaaatttgaaggagacaccctggtcaataggattgagctcaaggggattgacttcaaggaggatggcaacattctgggccataagctggagtataattacaattcccacaatgtctacattatggctgacaagcagaagaatggcattaaggtcaacttcaagattagacacaacatagaggatggatctgtgcagctggctgaccattaccagcagaatacacctattggggatgggccagtgctgctccctgacaatcactatctgagcacccaatctgctttgtctaaagatcctaatgaaaagagagatcacatggtgctgctggagtttgtaactgctgcaggaattaccttgggtatggatgaactctataagtaagcggccgcgactctagatcataatcagccataccacatttgtagaggttttacttgctttaaaaaacctcccacacctccccctgaacctgaaacataaaatgaatgcaattgttgttgttaacttgtttattgcagcttataatggttacaaataaagcaatagcatcacaaatttcacaaataaagcatttttttcactgcattctagttgtggtttgtccaaactcatcaatgtatcttaaggcgtaaattgtaagcgttaatattttgttaaaattcgcgttaaatttttgttaaatcagctcattttttaaccaataggccgaaatcggcaaaatcccttataaatcaaaagaatagaccgagatagggttgagtgttgttccagtttggaacaagagtccactattaaagaacgtggactccaacgtcaaagggcgaaaaaccgtctatcagggcgatggcccactacgtgaaccatcaccctaatcaagttttttggggtcgaggtgccgtaaagcactaaatcggaaccctaaagggagcccccgatttagagcttgacggggaaagccggcgaacgtggcgagaaaggaagggaagaaagcgaaaggagcgggcgctagggcgctggcaagtgtagcggtcacgctgcgcgtaaccaccacacccgccgcgcttaatgcgccgctacagggcgcgtcaggtggcacttttcggggaaatgtgcgcggaacccctatttgtttatttttctaaatacattcaaatatgtatccgctcatgagacaataaccctgataaatgcttcaataatattgaaaaaggaagagtcctgaggcggaaagaaccagctgtggaatgtgtgtcagttagggtgtggaaagtccccaggctccccagcaggcagaagtatgcaaagcatgcatctcaattagtcagcaaccaggtgtggaaagtccccaggctccccagcaggcagaagtatgcaaagcatgcatctcaattagtcagcaaccatagtcccgcccctaactccgcccatcccgcccctaactccgcccagttccgcccattctccgccccatggctgactaattttttttatttatgcagaggccgaggccgcctcggcctctgagctattccagaagtagtgaggaggcttttttggaggcctaggcttttgcaaagatcgatcaagagacaggatgaggatcgtttcgcatgattgaacaagatggattgcacgcaggttctccggccgcttgggtggagaggctattcggctatgactgggcacaacagacaatcggctgctctgatgccgccgtgttccggctgtcagcgcaggggcgcccggttctttttgtcaagaccgacctgtccggtgccctgaatgaactgcaagacgaggcagcgcggctatcgtggctggccacgacgggcgttccttgcgcagctgtgctcgacgttgtcactgaagcgggaagggactggctgctattgggcgaagtgccggggcaggatctcctgtcatctcaccttgctcctgccgagaaagtatccatcatggctgatgcaatgcggcggctgcatacgcttgatccggctacctgcccattcgaccaccaagcgaaacatcgcatcgagcgagcacgtactcggatggaagccggtcttgtcgatcaggatgatctggacgaagagcatcaggggctcgcgccagccgaactgttcgccaggctcaaggcgagcatgcccgacggcgaggatctcgtcgtgacccatggcgatgcctgcttgccgaatatcatggtggaaaatggccgcttttctggattcatcgactgtggccggctgggtgtggcggaccgctatcaggacatagcgttggctacccgtgatattgctgaagagcttggcggcgaatgggctgaccgcttcctcgtgctttacggtatcgccgctcccgattcgcagcgcatcgccttctatcgccttcttgacgagttcttctgagcgggactctggggttcgaaatgaccgaccaagcgacgcccaacctgccatcacgagatttcgattccaccgccgccttctatgaaaggttgggcttcggaatcgttttccgggacgccggctggatgatcctccagcgcggggatctcatgctggagttcttcgcccaccctagggggaggctaactgaaacacggaaggagacaataccggaaggaacccgcgctatgacggcaataaaaagacagaataaaacgcacggtgttgggtcgtttgttcataaacgcggggttcggtcccagggctggcactctgtcgataccccaccgagaccccattggggccaatacgcccgcgtttcttccttttccccaccccaccccccaagttcgggtgaaggcccagggctcgcagccaacgtcggggcggcaggccctgccatagcctcaggttactcatatatactttagattgatttaaaacttcatttttaatttaaaaggatctaggtgaagatcctttttgataatctcatgaccaaaatcccttaacgtgagttttcgttccactgagcgtcagaccccgtagaaaagatcaaaggatcttcttgagatcctttttttctgcgcgtaatctgctgcttgcaaacaaaaaaaccaccgctaccagcggtggtttgtttgccggatcaagagctaccaactctttttccgaaggtaactggcttcagcagagcgcagataccaaatactgtccttctagtgtagccgtagttaggccaccacttcaagaactctgtagcaccgcctacatacctcgctctgctaatcctgttaccagtggctgctgccagtggcgataagtcgtgtcttaccgggttggactcaagacgatagttaccggataaggcgcagcggtcgggctgaacggggggttcgtgcacacagcccagcttggagcgaacgacctacaccgaactgagatacctacagcgtgagctatgagaaagcgccacgcttcccgaagggagaaaggcggacaggtatccggtaagcggcagggtcggaacaggagagcgcacgagggagcttccagggggaaacgcctggtatctttatagtcctgtcgggtttcgccacctctgacttgagcgtcgatttttgtgatgctcgtcaggggggcggagcctatggaaaaacgccagcaacgcggcctttttacggttcctggccttttgctggccttttgctcacatgttctttcctgcgttatcccctgattctgtggataaccgtattaccgccatgcat

SEQ ID NO: 714 - DNA, 6273 bp, Artificial Sequence
  pCzVSVG-I-zGFP
  CDS (603)...(1625): VSV-G
tagttattaatagtaatcaattacggggtcattagttcatagcccatatatggagttccgcgttacataacttacggtaaatggcccgcctggctgaccgcccaacgacccccgcccattgacgtcaataatgacgtatgttcccatagtaacgccaatagggactttccattgacgtcaatgggtggagtatttacggtaaactgcccacttggcagtacatcaagtgtatcatatgccaagtacgccccctattgacgtcaatgacggtaaatggcccgcctggcattatgcccagtacatgaccttatgggactttcctacttggcagtacatctacgtattagtcatcgctattaccatggtgatgcggttttggcagtacatcaatgggcgtggatagcggtttgactcacggggatttccaagtctccaccccattgacgtcaatgggagtttgttttggcaccaaaatcaacgggactttccaaaatgtcgtaacaactccgccccattgacgcaaatgggcggtaggcgtgtacggtgggaggtctatataagcagagctggtttagtgaaccgtcagatccgctagctagaccatgaaatgctatgctggggtaaactgcaagacagtccataacaaggggaattggaaaaatgtgtccaattaccattattgttcatcctctgataattggcacaatgatggcacagctgtgaaaatgaagtcccacaaggctgcagatggatggatgtgtcatgccagcaagtgggttaccacttgtgacaggtggtatgggaaatacacccattctaggtccacctctgtgtgtaagtctacaaagggtacttggaatggctcctgtggatatgccacagtaactgatgctgcagtggttgtgacccaccatgtggttgactacactggttgggtggactccaatggtaagtgtagcaactactgtactgttcataacagtaccacttggcattcagattataaagtcaaggggtgtgattcaaactccatggacacctctgatggttcaagtggaaaaggaacaggcagatctaactatgcttatactggtggtaaggcatgtaagatgtactgtaaacattggggagttaggtctggagtgtggatggcagataaggatgctgcagccaggtgtggtagtagttctgccagcacttctgttgatgtgtctgatgtgagagattactcatgcacttggagtaagagggcaggtagtgtagatagttatgcaaaaaatggcactggggccacaaatggcacaaaatataccagatacagggtggatgcagcctctaggatggtgggtatgagtgggaccaccactaggtgggatgactgggcatatgatgttgggaatggagtgagaacatcatcaggctacaaatacatgggacatggtatggatagtgatcatagttcaaaggctgtgcaccatgatgctgcatctgatgactcaggagacactgggagtaagaatgttggttggtcttcttggaaatctagtgcatctgggggtgttagagtaggacactgcaagaaacatactaaaaagaggtatactgacatgaatagagggaaatgaggatccgcccctctccctcccccccccctaacgttactggccgaagccgcttggaataaggccggtgtgcgtttgtctatatgttattttccaccatattgccgtcttttggcaatgtgagggcccggaaacctggccctgtcttcttgacgagcattcctaggggtctttcccctctcgccaaaggaatgcaaggtctgttgaatgtcgtgaaggaagcagttcctctggaagcttcttgaagacaaacaacgtctgtagcgaccctttgcaggcagcggaaccccccacctggcgacaggtgcctctgcggccaaaagccacgtgtataagatacacctgcaaaggcggcacaaccccagtgccacgttgtgagttggatagttgtggaaagagtcaaatggctctcctcaagcgtattcaacaaggggctgaaggatgcccagaaggtaccccattgtatgggatctgatctggggcctcggtgcacatgctttacatgtgtttagtcgaggttaaaaaaacgtctaggccccccgaaccacggggacgtggttttcctttgaaaaacacgatgataatatggccacaaccatggtgagcaagggagaggaactctttacaggtgtggtcccaattctggtggagctggatggagatgtgaatgggcacaaattttctgtcagtggagagggagagggggatgctacctatggcaaactgactctgaagttcatctgcactactggcaagctgcctgtgccatggccaactctggtgacaaccctcacctatggagtccagtgcttttccagatatcctgaccacatgaaacagcatgactttttcaaatctgcaatgcctgagggctatgtgcaagagagaactatctttttcaaggatgatgggaactataagactagggctgaggtgaaatttgaaggagacaccctggtcaataggattgagctcaaggggattgacttcaaggaggatggcaacattctgggccataagctggagtataattacaattcccacaatgtctacattatggctgacaagcagaagaatggcattaaggtcaacttcaagattagacacaacatagaggatggatctgtgcagctggctgaccattaccagcagaatacacctattggggatgggccagtgctgctccctgacaatcactatctgagcacccaatctgctttgtctaaagatcctaatgaaaagagagatcacatggtgctgctggagtttgtaactgctgcaggaattaccttgggtatggatgaactctataagtaagcggccgcgactctagatcataatcagccataccacatttgtagaggttttacttgctttaaaaaacctcccacacctccccctgaacctgaaacataaaatgaatgcaattgttgttgttaacttgtttattgcagcttataatggttacaaataaagcaatagcatcacaaatttcacaaataaagcatttttttcactgcattctagttgtggtttgtccaaactcatcaatgtatcttaaggcgtaaattgtaagcgttaatattttgttaaaattcgcgttaaatttttgttaaatcagctcattttttaaccaataggccgaaatcggcaaaatcccttataaatcaaaagaatagaccgagatagggttgagtgttgttccagtttggaacaagagtccactattaaagaacgtggactccaacgtcaaagggcgaaaaaccgtctatcagggcgatggcccactacgtgaaccatcaccctaatcaagttttttggggtcgaggtgccgtaaagcactaaatcggaaccctaaagggagcccccgatttagagcttgacggggaaagccggcgaacgtggcgagaaaggaagggaagaaagcgaaaggagcgggcgctagggcgctggcaagtgtagcggtcacgctgcgcgtaaccaccacacccgccgcgcttaatgcgccgctacagggcgcgtcaggtggcacttttcggggaaatgtgcgcggaacccctatttgtttatttttctaaatacattcaaatatgtatccgctcatgagacaataaccctgataaatgcttcaataatattgaaaaaggaagagtcctgaggcggaaagaaccagctgtggaatgtgtgtcagttagggtgtggaaagtccccaggctccccagcaggcagaagtatgcaaagcatgcatctcaattagtcagcaaccaggtgtggaaagtccccaggctccccagcaggcagaagtatgcaaagcatgcatctcaattagtcagcaaccatagtcccgcccctaactccgcccatcccgcccctaactccgcccagttccgcccattctccgccccatggctgactaattttttttatttatgcagaggccgaggccgcctcggcctctgagctattccagaagtagtgaggaggcttttttggaggcctaggcttttgcaaagatcgatcaagagacaggatgaggatcgtttcgcatgattgaacaagatggattgcacgcaggttctccggccgcttgggtggagaggctattcggctatgactgggcacaacagacaatcggctgctctgatgccgccgtgttccggctgtcagcgcaggggcgcccggttctttttgtcaagaccgacctgtccggtgccctgaatgaactgcaagacgaggcagcgcggctatcgtggctggccacgacgggcgttccttgcgcagctgtgctcgacgttgtcactgaagcgggaagggactggctgctattgggcgaagtgccggggcaggatctcctgtcatctcaccttgctcctgccgagaaagtatccatcatggctgatgcaatgcggcggctgcatacgcttgatccggctacctgcccattcgaccaccaagcgaaacatcgcatcgagcgagcacgtactcggatggaagccggtcttgtcgatcaggatgatctggacgaagagcatcaggggctcgcgccagccgaactgttcgccaggctcaaggcgagcatgcccgacggcgaggatctcgtcgtgacccatggcgatgcctgcttgccgaatatcatggtggaaaatggccgcttttctggattcatcgactgtggccggctgggtgtggcggaccgctatcaggacatagcgttggctacccgtgatattgctgaagagcttggcggcgaatgggctgaccgcttcctcgtgctttacggtatcgccgctcccgattcgcagcgcatcgccttctatcgccttcttgacgagttcttctgagcgggactctggggttcgaaatgaccgaccaagcgacgcccaacctgccatcacgagatttcgattccaccgccgccttctatgaaaggttgggcttcggaatcgttttccgggacgccggctggatgatcctccagcgcggggatctcatgctggagttcttcgcccaccctagggggaggctaactgaaacacggaaggagacaataccggaaggaacccgcgctatgacggcaataaaaagacagaataaaacgcacggtgttgggtcgtttgttcataaacgcggggttcggtcccagggctggcactctgtcgataccccaccgagaccccattggggccaatacgcccgcgtttcttccttttccccaccccaccccccaagttcgggtgaaggcccagggctcgcagccaacgtcggggcggcaggccctgccatagcctcaggttactcatatatactttagattgatttaaaacttcatttttaatttaaaaggatctaggtgaagatcctttttgataatctcatgaccaaaatcccttaacgtgagttttcgttccactgagcgtcagaccccgtagaaaagatcaaaggatcttcttgagatcctttttttctgcgcgtaatctgctgcttgcaaacaaaaaaaccaccgctaccagcggtggtttgtttgccggatcaagagctaccaactctttttccgaaggtaactggcttcagcagagcgcagataccaaatactgtccttctagtgtagccgtagttaggccaccacttcaagaactctgtagcaccgcctacatacctcgctctgctaatcctgttaccagtggctgctgccagtggcgataagtcgtgtcttaccgggttggactcaagacgatagttaccggataaggcgcagcggtcgggctgaacggggggttcgtgcacacagcccagcttggagcgaacgacctacaccgaactgagatacctacagcgtgagctatgagaaagcgccacgcttcccgaagggagaaaggcggacaggtatccggtaagcggcagggtcggaacaggagagcgcacgagggagcttccagggggaaacgcctggtatctttatagtcctgtcgggtttcgccacctctgacttgagcgtcgatttttgtgatgctcgtcaggggggcggagcctatggaaaaacgccagcaacgcggcctttttacggttcctggccttttgctggccttttgctcacatgttctttcctgcgttatcccctgattctgtggataaccgtattaccgccatgcat

SEQ ID NO: 715 - DNA, 5547 bp, Artificial Sequence
  pCzARVp10-I-zGFP
  CDS (603)...(899): ARVp10
tagttattaatagtaatcaattacggggtcattagttcatagcccatatatggagttccgcgttacataacttacggtaaatggcccgcctggctgaccgcccaacgacccccgcccattgacgtcaataatgacgtatgttcccatagtaacgccaatagggactttccattgacgtcaatgggtggagtatttacggtaaactgcccacttggcagtacatcaagtgtatcatatgccaagtacgccccctattgacgtcaatgacggtaaatggcccgcctggcattatgcccagtacatgaccttatgggactttcctacttggcagtacatctacgtattagtcatcgctattaccatggtgatgcggttttggcagtacatcaatgggcgtggatagcggtttgactcacggggatttccaagtctccaccccattgacgtcaatgggagtttgttttggcaccaaaatcaacgggactttccaaaatgtcgtaacaactccgccccattgacgcaaatgggcggtaggcgtgtacggtgggaggtctatataagcagagctggtttagtgaaccgtcagatccgctagctagaccatgctcagaatgcctccaggaagttgtaatggtgctacagctgtgtttggaaatgttcactgtcaagcagctcagaatactgctggtggggatctgcaggccacttcatccatcattgcatactggccttacctggcagctggaggtggctttctcctgatagtcattatttttgccctgctgtactgttgcaaggccaaaatcaaagcagatgctgccagaagtgtcttccacagggagctggtggctctcagctctggcaagcacaatgctatggctcctccatatgatgtttaaggatccgcccctctccctcccccccccctaacgttactggccgaagccgcttggaataaggccggtgtgcgtttgtctatatgttattttccaccatattgccgtcttttggcaatgtgagggcccggaaacctggccctgtcttcttgacgagcattcctaggggtctttcccctctcgccaaaggaatgcaaggtctgttgaatgtcgtgaaggaagcagttcctctggaagcttcttgaagacaaacaacgtctgtagcgaccctttgcaggcagcggaaccccccacctggcgacaggtgcctctgcggccaaaagccacgtgtataagatacacctgcaaaggcggcacaaccccagtgccacgttgtgagttggatagttgtggaaagagtcaaatggctctcctcaagcgtattcaacaaggggctgaaggatgcccagaaggtaccccattgtatgggatctgatctggggcctcggtgcacatgctttacatgtgtttagtcgaggttaaaaaaacgtctaggccccccgaaccacggggacgtggttttcctttgaaaaacacgatgataatatggccacaaccatggtgagcaagggagaggaactctttacaggtgtggtcccaattctggtggagctggatggagatgtgaatgggcacaaattttctgtcagtggagagggagagggggatgctacctatggcaaactgactctgaagttcatctgcactactggcaagctgcctgtgccatggccaactctggtgacaaccctcacctatggagtccagtgcttttccagatatcctgaccacatgaaacagcatgactttttcaaatctgcaatgcctgagggctatgtgcaagagagaactatctttttcaaggatgatgggaactataagactagggctgaggtgaaatttgaaggagacaccctggtcaataggattgagctcaaggggattgacttcaaggaggatggcaacattctgggccataagctggagtataattacaattcccacaatgtctacattatggctgacaagcagaagaatggcattaaggtcaacttcaagattagacacaacatagaggatggatctgtgcagctggctgaccattaccagcagaatacacctattggggatgggccagtgctgctccctgacaatcactatctgagcacccaatctgctttgtctaaagatcctaatgaaaagagagatcacatggtgctgctggagtttgtaactgctgcaggaattaccttgggtatggatgaactctataagtaagcggccgcgactctagatcataatcagccataccacatttgtagaggttttacttgctttaaaaaacctcccacacctccccctgaacctgaaacataaaatgaatgcaattgttgttgttaacttgtttattgcagcttataatggttacaaataaagcaatagcatcacaaatttcacaaataaagcatttttttcactgcattctagttgtggtttgtccaaactcatcaatgtatcttaaggcgtaaattgtaagcgttaatattttgttaaaattcgcgttaaatttttgttaaatcagctcattttttaaccaataggccgaaatcggcaaaatcccttataaatcaaaagaatagaccgagatagggttgagtgttgttccagtttggaacaagagtccactattaaagaacgtggactccaacgtcaaagggcgaaaaaccgtctatcagggcgatggcccactacgtgaaccatcaccctaatcaagttttttggggtcgaggtgccgtaaagcactaaatcggaaccctaaagggagcccccgatttagagcttgacggggaaagccggcgaacgtggcgagaaaggaagggaagaaagcgaaaggagcgggcgctagggcgctggcaagtgtagcggtcacgctgcgcgtaaccaccacacccgccgcgcttaatgcgccgctacagggcgcgtcaggtggcacttttcggggaaatgtgcgcggaacccctatttgtttatttttctaaatacattcaaatatgtatccgctcatgagacaataaccctgataaatgcttcaataatattgaaaaaggaagagtcctgaggcggaaagaaccagctgtggaatgtgtgtcagttagggtgtggaaagtccccaggctccccagcaggcagaagtatgcaaagcatgcatctcaattagtcagcaaccaggtgtggaaagtccccaggctccccagcaggcagaagtatgcaaagcatgcatctcaattagtcagcaaccatagtcccgcccctaactccgcccatcccgcccctaactccgcccagttccgcccattctccgccccatggctgactaattttttttatttatgcagaggccgaggccgcctcggcctctgagctattccagaagtagtgaggaggcttttttggaggcctaggcttttgcaaagatcgatcaagagacaggatgaggatcgtttcgcatgattgaacaagatggattgcacgcaggttctccggccgcttgggtggagaggctattcggctatgactgggcacaacagacaatcggctgctctgatgccgccgtgttccggctgtcagcgcaggggcgcccggttctttttgtcaagaccgacctgtccggtgccctgaatgaactgcaagacgaggcagcgcggctatcgtggctggccacgacgggcgttccttgcgcagctgtgctcgacgttgtcactgaagcgggaagggactggctgctattgggcgaagtgccggggcaggatctcctgtcatctcaccttgctcctgccgagaaagtatccatcatggctgatgcaatgcggcggctgcatacgcttgatccggctacctgcccattcgaccaccaagcgaaacatcgcatcgagcgagcacgtactcggatggaagccggtcttgtcgatcaggatgatctggacgaagagcatcaggggctcgcgccagccgaactgttcgccaggctcaaggcgagcatgcccgacggcgaggatctcgtcgtgacccatggcgatgcctgcttgccgaatatcatggtggaaaatggccgcttttctggattcatcgactgtggccggctgggtgtggcggaccgctatcaggacatagcgttggctacccgtgatattgctgaagagcttggcggcgaatgggctgaccgcttcctcgtgctttacggtatcgccgctcccgattcgcagcgcatcgccttctatcgccttcttgacgagttcttctgagcgggactctggggttcgaaatgaccgaccaagcgacgcccaacctgccatcacgagatttcgattccaccgccgccttctatgaaaggttgggcttcggaatcgttttccgggacgccggctggatgatcctccagcgcggggatctcatgctggagttcttcgcccaccctagggggaggctaactgaaacacggaaggagacaataccggaaggaacccgcgctatgacggcaataaaaagacagaataaaacgcacggtgttgggtcgtttgttcataaacgcggggttcggtcccagggctggcactctgtcgataccccaccgagaccccattggggccaatacgcccgcgtttcttccttttccccaccccaccccccaagttcgggtgaaggcccagggctcgcagccaacgtcggggcggcaggccctgccatagcctcaggttactcatatatactttagattgatttaaaacttcatttttaatttaaaaggatctaggtgaagatcctttttgataatctcatgaccaaaatcccttaacgtgagttttcgttccactgagcgtcagaccccgtagaaaagatcaaaggatcttcttgagatcctttttttctgcgcgtaatctgctgcttgcaaacaaaaaaaccaccgctaccagcggtggtttgtttgccggatcaagagctaccaactctttttccgaaggtaactggcttcagcagagcgcagataccaaatactgtccttctagtgtagccgtagttaggccaccacttcaagaactctgtagcaccgcctacatacctcgctctgctaatcctgttaccagtggctgctgccagtggcgataagtcgtgtcttaccgggttggactcaagacgatagttaccggataaggcgcagcggtcgggctgaacggggggttcgtgcacacagcccagcttggagcgaacgacctacaccgaactgagatacctacagcgtgagctatgagaaagcgccacgcttcccgaagggagaaaggcggacaggtatccggtaagcggcagggtcggaacaggagagcgcacgagggagcttccagggggaaacgcctggtatctttatagtcctgtcgggtttcgccacctctgacttgagcgtcgatttttgtgatgctcgtcaggggggcggagcctatggaaaaacgccagcaacgcggcctttttacggttcctggccttttgctggccttttgctcacatgttctttcctgcgttatcccctgattctgtggataaccgtattaccgccatgcat

SEQ ID NO: 716 - DNA, 5628 bp, Artificial Sequence
  pCzRRVp14-I-zGFP
  CDS (603)...(980): RRVp14
tagttattaatagtaatcaattacggggtcattagttcatagcccatatatggagttccgcgttacataacttacggtaaatggcccgcctggctgaccgcccaacgacccccgcccattgacgtcaataatgacgtatgttcccatagtaacgccaatagggactttccattgacgtcaatgggtggagtatttacggtaaactgcccacttggcagtacatcaagtgtatcatatgccaagtacgccccctattgacgtcaatgacggtaaatggcccgcctggcattatgcccagtacatgaccttatgggactttcctacttggcagtacatctacgtattagtcatcgctattaccatggtgatgcggttttggcagtacatcaatgggcgtggatagcggtttgactcacggggatttccaagtctccaccccattgacgtcaatgggagtttgttttggcaccaaaatcaacgggactttccaaaatgtcgtaacaactccgccccattgacgcaaatgggcggtaggcgtgtacggtgggaggtctatataagcagagctggtttagtgaaccgtcagatccgctagctagaccatgggatctgggccatctaattttgttaatcatgcacctggggaagccattgtgactgggctggagaagggagcagataaagttgctgggaccatcagccacactatttgggaggtcattgcaggcttggtggctcttttgaccttcctggcatttggcttctggctgttcaagtacctgcagaagaggagagaaagaaggagacagctcacagaattccagaagaggtatctgagaaattcctacagattgtcagaaattcaaaggccaatttctcagcatgagtatgaagacccctatgagcctccatccagaaggaaacctccccctccaccttactccacttatgtgaatattgacaatgtatctgccatataaggatccgcccctctccctcccccccccctaacgttactggccgaagccgcttggaataaggccggtgtgcgtttgtctatatgttattttccaccatattgccgtcttttggcaatgtgagggcccggaaacctggccctgtcttcttgacgagcattcctaggggtctttcccctctcgccaaaggaatgcaaggtctgttgaatgtcgtgaaggaagcagttcctctggaagcttcttgaagacaaacaacgtctgtagcgaccctttgcaggcagcggaaccccccacctggcgacaggtgcctctgcggccaaaagccacgtgtataagatacacctgcaaaggcggcacaaccccagtgccacgttgtgagttggatagttgtggaaagagtcaaatggctctcctcaagcgtattcaacaaggggctgaaggatgcccagaaggtaccccattgtatgggatctgatctggggcctcggtgcacatgctttacatgtgtttagtcgaggttaaaaaaacgtctaggccccccgaaccacggggacgtggttttcctttgaaaaacacgatgataatatggccacaaccatggtgagcaagggagaggaactctttacaggtgtggtcccaattctggtggagctggatggagatgtgaatgggcacaaattttctgtcagtggagagggagagggggatgctacctatggcaaactgactctgaagttcatctgcactactggcaagctgcctgtgccatggccaactctggtgacaaccctcacctatggagtccagtgcttttccagatatcctgaccacatgaaacagcatgactttttcaaatctgcaatgcctgagggctatgtgcaagagagaactatctttttcaaggatgatgggaactataagactagggctgaggtgaaatttgaaggagacaccctggtcaataggattgagctcaaggggattgacttcaaggaggatggcaacattctgggccataagctggagtataattacaattcccacaatgtctacattatggctgacaagcagaagaatggcattaaggtcaacttcaagattagacacaacatagaggatggatctgtgcagctggctgaccattaccagcagaatacacctattggggatgggccagtgctgctccctgacaatcactatctgagcacccaatctgctttgtctaaagatcctaatgaaaagagagatcacatggtgctgctggagtttgtaactgctgcaggaattaccttgggtatggatgaactctataagtaagcggccgcgactctagatcataatcagccataccacatttgtagaggttttacttgctttaaaaaacctcccacacctccccctgaacctgaaacataaaatgaatgcaattgttgttgttaacttgtttattgcagcttataatggttacaaataaagcaatagcatcacaaatttcacaaataaagcatttttttcactgcattctagttgtggtttgtccaaactcatcaatgtatcttaaggcgtaaattgtaagcgttaatattttgttaaaattcgcgttaaatttttgttaaatcagctcattttttaaccaataggccgaaatcggcaaaatcccttataaatcaaaagaatagaccgagatagggttgagtgttgttccagtttggaacaagagtccactattaaagaacgtggactccaacgtcaaagggcgaaaaaccgtctatcagggcgatggcccactacgtgaaccatcaccctaatcaagttttttggggtcgaggtgccgtaaagcactaaatcggaaccctaaagggagcccccgatttagagcttgacggggaaagccggcgaacgtggcgagaaaggaagggaagaaagcgaaaggagcgggcgctagggcgctggcaagtgtagcggtcacgctgcgcgtaaccaccacacccgccgcgcttaatgcgccgctacagggcgcgtcaggtggcacttttcggggaaatgtgcgcggaacccctatttgtttatttttctaaatacattcaaatatgtatccgctcatgagacaataaccctgataaatgcttcaataatattgaaaaaggaagagtcctgaggcggaaagaaccagctgtggaatgtgtgtcagttagggtgtggaaagtccccaggctccccagcaggcagaagtatgcaaagcatgcatctcaattagtcagcaaccaggtgtggaaagtccccaggctccccagcaggcagaagtatgcaaagcatgcatctcaattagtcagcaaccatagtcccgcccctaactccgcccatcccgcccctaactccgcccagttccgcccattctccgccccatggctgactaattttttttatttatgcagaggccgaggccgcctcggcctctgagctattccagaagtagtgaggaggcttttttggaggcctaggcttttgcaaagatcgatcaagagacaggatgaggatcgtttcgcatgattgaacaagatggattgcacgcaggttctccggccgcttgggtggagaggctattcggctatgactgggcacaacagacaatcggctgctctgatgccgccgtgttccggctgtcagcgcaggggcgcccggttctttttgtcaagaccgacctgtccggtgccctgaatgaactgcaagacgaggcagcgcggctatcgtggctggccacgacgggcgttccttgcgcagctgtgctcgacgttgtcactgaagcgggaagggactggctgctattgggcgaagtgccggggcaggatctcctgtcatctcaccttgctcctgccgagaaagtatccatcatggctgatgcaatgcggcggctgcatacgcttgatccggctacctgcccattcgaccaccaagcgaaacatcgcatcgagcgagcacgtactcggatggaagccggtcttgtcgatcaggatgatctggacgaagagcatcaggggctcgcgccagccgaactgttcgccaggctcaaggcgagcatgcccgacggcgaggatctcgtcgtgacccatggcgatgcctgcttgccgaatatcatggtggaaaatggccgcttttctggattcatcgactgtggccggctgggtgtggcggaccgctatcaggacatagcgttggctacccgtgatattgctgaagagcttggcggcgaatgggctgaccgcttcctcgtgctttacggtatcgccgctcccgattcgcagcgcatcgccttctatcgccttcttgacgagttcttctgagcgggactctggggttcgaaatgaccgaccaagcgacgcccaacctgccatcacgagatttcgattccaccgccgccttctatgaaaggttgggcttcggaatcgttttccgggacgccggctggatgatcctccagcgcggggatctcatgctggagttcttcgcccaccctagggggaggctaactgaaacacggaaggagacaataccggaaggaacccgcgctatgacggcaataaaaagacagaataaaacgcacggtgttgggtcgtttgttcataaacgcggggttcggtcccagggctggcactctgtcgataccccaccgagaccccattggggccaatacgcccgcgtttcttccttttccccaccccaccccccaagttcgggtgaaggcccagggctcgcagccaacgtcggggcggcaggccctgccatagcctcaggttactcatatatactttagattgatttaaaacttcatttttaatttaaaaggatctaggtgaagatcctttttgataatctcatgaccaaaatcccttaacgtgagttttcgttccactgagcgtcagaccccgtagaaaagatcaaaggatcttcttgagatcctttttttctgcgcgtaatctgctgcttgcaaacaaaaaaaccaccgctaccagcggtggtttgtttgccggatcaagagctaccaactctttttccgaaggtaactggcttcagcagagcgcagataccaaatactgtccttctagtgtagccgtagttaggccaccacttcaagaactctgtagcaccgcctacatacctcgctctgctaatcctgttaccagtggctgctgccagtggcgataagtcgtgtcttaccgggttggactcaagacgatagttaccggataaggcgcagcggtcgggctgaacggggggttcgtgcacacagcccagcttggagcgaacgacctacaccgaactgagatacctacagcgtgagctatgagaaagcgccacgcttcccgaagggagaaaggcggacaggtatccggtaagcggcagggtcggaacaggagagcgcacgagggagcttccagggggaaacgcctggtatctttatagtcctgtcgggtttcgccacctctgacttgagcgtcgatttttgtgatgctcgtcaggggggcggagcctatggaaaaacgccagcaacgcggcctttttacggttcctggccttttgctggccttttgctcacatgttctttcctgcgttatcccctgattctgtggataaccgtattaccgccatgcat

SEQ ID NO: 717 - DNA, 5674 bp, Artificial Sequence
  pCzBRVp15-I-zGFP
tagttattaatagtaatcaattacggggtcattagttcatagcccatatatggagttccgcgttacataacttacggtaaatggcccgcctggctgaccgcccaacgacccccgcccattgacgtcaataatgacgtatgttcccatagtaacgccaatagggactttccattgacgtcaatgggtggagtatttacggtaaactgcccacttggcagtacatcaagtgtatcatatgccaagtacgccccctattgacgtcaatgacggtaaatggcccgcctggcattatgcccagtacatgaccttatgggactttcctacttggcagtacatctacgtattagtcatcgctattaccatggtgatgcggttttggcagtacatcaatgggcgtggatagcggtttgactcacggggatttccaagtctccaccccattgacgtcaatgggagtttgttttggcaccaaaatcaacgggactttccaaaatgtcgtaacaactccgccccattgacgcaaatgggcggtaggcgtgtacggtgggaggtctatataagcagagctggtttagtgaaccgtcagatccgctagctagaccatgggtcaaagacattcaatagttcaaccaccagctccaccgccaaatgcttttgttgaaattgtgagcagttctactggcattataatcgctgttggcatatttgcatttatattctcatttttatataagttgctgcagtggtacaatcgtaagtcaaagaataagaaacgtaaagagcaaattagagaacaaattgagcttggtttattatcatatggtgctggagtagcatcacttcctttgctcaacgttattgcacataatcctggatcagttatctcggctacccctatctataaaggtccgtgcactggtgtacctaattcgcgcctacttcaaatcacgagcgggactgcagaagagaacactagaattttgaatcatgatggaagaaacccagatggaagtatcaacgtttgaggatccgcccctctccctcccccccccctaacgttactggccgaagccgcttggaataaggccggtgtgcgtttgtctatatgttattttccaccatattgccgtcttttggcaatgtgagggcccggaaacctggccctgtcttcttgacgagcattcctaggggtctttcccctctcgccaaaggaatgcaaggtctgttgaatgtcgtgaaggaagcagttcctctggaagcttcttgaagacaaacaacgtctgtagcgaccctttgcaggcagcggaaccccccacctggcgacaggtgcctctgcggccaaaagccacgtgtataagatacacctgcaaaggcggcacaaccccagtgccacgttgtgagttggatagttgtggaaagagtcaaatggctctcctcaagcgtattcaacaaggggctgaaggatgcccagaaggtaccccattgtatgggatctgatctggggcctcggtgcacatgctttacatgtgtttagtcgaggttaaaaaaacgtctaggccccccgaaccacggggacgtggttttcctttgaaaaacacgatgataatatggccacaaccatggtgagcaagggcgaggagctgttcaccggggtggtgcccatcctggtcgagctggacggcgacgtaaacggccacaagttcagcgtgtccggcgagggcgagggcgatgccacctacggcaagctgaccctgaagttcatctgcaccaccggcaagctgcccgtgccctggcccaccctcgtgaccaccctgacctacggcgtgcagtgcttcagccgctaccccgaccacatgaagcagcacgacttcttcaagtccgccatgcccgaaggctacgtccaggagcgcaccatcttcttcaaggacgacggcaactacaagacccgcgccgaggtgaagttcgagggcgacaccctggtgaaccgcatcgagctgaagggcatcgacttcaaggaggacggcaacatcctggggcacaagctggagtacaactacaacagccacaacgtctatatcatggccgacaagcagaagaacggcatcaaggtgaacttcaagatccgccacaacatcgaggacggcagcgtgcagctcgccgaccactaccagcagaacacccccatcggcgacggccccgtgctgctgcccgacaaccactacctgagcacccagtccgccctgagcaaagaccccaacgagaagcgcgatcacatggtcctgctggagttcgtgaccgccgccgggatcactctcggcatggacgagctgtacaagtaaagcggccgcgactctagatcataatcagccataccacatttgtagaggttttacttgctttaaaaaacctcccacacctccccctgaacctgaaacataaaatgaatgcaattgttgttgttaacttgtttattgcagcttataatggttacaaataaagcaatagcatcacaaatttcacaaataaagcatttttttcactgcattctagttgtggtttgtccaaactcatcaatgtatcttaaggcgtaaattgtaagcgttaatattttgttaaaattcgcgttaaatttttgttaaatcagctcattttttaaccaataggccgaaatcggcaaaatcccttataaatcaaaagaatagaccgagatagggttgagtgttgttccagtttggaacaagagtccactattaaagaacgtggactccaacgtcaaagggcgaaaaaccgtctatcagggcgatggcccactacgtgaaccatcaccctaatcaagttttttggggtcgaggtgccgtaaagcactaaatcggaaccctaaagggagcccccgatttagagcttgacggggaaagccggcgaacgtggcgagaaaggaagggaagaaagcgaaaggagcgggcgctagggcgctggcaagtgtagcggtcacgctgcgcgtaaccaccacacccgccgcgcttaatgcgccgctacagggcgcgtcaggtggcacttttcggggaaatgtgcgcggaacccctatttgtttatttttctaaatacattcaaatatgtatccgctcatgagacaataaccctgataaatgcttcaataatattgaaaaaggaagagtcctgaggcggaaagaaccagctgtggaatgtgtgtcagttagggtgtggaaagtccccaggctccccagcaggcagaagtatgcaaagcatgcatctcaattagtcagcaaccaggtgtggaaagtccccaggctccccagcaggcagaagtatgcaaagcatgcatctcaattagtcagcaaccatagtcccgcccctaactccgcccatcccgcccctaactccgcccagttccgcccattctccgccccatggctgactaattttttttatttatgcagaggccgaggccgcctcggcctctgagctattccagaagtagtgaggaggcttttttggaggcctaggcttttgcaaagatcgatcaagagacaggatgaggatcgtttcgcatgattgaacaagatggattgcacgcaggttctccggccgcttgggtggagaggctattcggctatgactgggcacaacagacaatcggctgctctgatgccgccgtgttccggctgtcagcgcaggggcgcccggttctttttgtcaagaccgacctgtccggtgccctgaatgaactgcaagacgaggcagcgcggctatcgtggctggccacgacgggcgttccttgcgcagctgtgctcgacgttgtcactgaagcgggaagggactggctgctattgggcgaagtgccggggcaggatctcctgtcatctcaccttgctcctgccgagaaagtatccatcatggctgatgcaatgcggcggctgcatacgcttgatccggctacctgcccattcgaccaccaagcgaaacatcgcatcgagcgagcacgtactcggatggaagccggtcttgtcgatcaggatgatctggacgaagagcatcaggggctcgcgccagccgaactgttcgccaggctcaaggcgagcatgcccgacggcgaggatctcgtcgtgacccatggcgatgcctgcttgccgaatatcatggtggaaaatggccgcttttctggattcatcgactgtggccggctgggtgtggcggaccgctatcaggacatagcgttggctacccgtgatattgctgaagagcttggcggcgaatgggctgaccgcttcctcgtgctttacggtatcgccgctcccgattcgcagcgcatcgccttctatcgccttcttgacgagttcttctgagcgggactctggggttcgaaatgaccgaccaagcgacgcccaacctgccatcacgagatttcgattccaccgccgccttctatgaaaggttgggcttcggaatcgttttccgggacgccggctggatgatcctccagcgcggggatctcatgctggagttcttcgcccaccctagggggaggctaactgaaacacggaaggagacaataccggaaggaacccgcgctatgacggcaataaaaagacagaataaaacgcacggtgttgggtcgtttgttcataaacgcggggttcggtcccagggctggcactctgtcgataccccaccgagaccccattggggccaatacgcccgcgtttcttccttttccccaccccaccccccaagttcgggtgaaggcccagggctcgcagccaacgtcggggcggcaggccctgccatagcctcaggttactcatatatactttagattgatttaaaacttcatttttaatttaaaaggatctaggtgaagatcctttttgataatctcatgaccaaaatcccttaacgtgagttttcgttccactgagcgtcagaccccgtagaaaagatcaaaggatcttcttgagatcctttttttctgcgcgtaatctgctgcttgcaaacaaaaaaaccaccgctaccagcggtggtttgtttgccggatcaagagctaccaactctttttccgaaggtaactggcttcagcagagcgcagataccaaatactgtccttctagtgtagccgtagttaggccaccacttcaagaactctgtagcaccgcctacatacctcgctctgctaatcctgttaccagtggctgctgccagtggcgataagtcgtgtcttaccgggttggactcaagacgatagttaccggataaggcgcagcggtcgggctgaacggggggttcgtgcacacagcccagcttggagcgaacgacctacaccgaactgagatacctacagcgtgagctatgagaaagcgccacgcttcccgaagggagaaaggcggacaggtatccggtaagcggcagggtcggaacaggagagcgcacgagggagcttccagggggaaacgcctggtatctttatagtcctgtcgggtttcgccacctctgacttgagcgtcgatttttgtgatgctcgtcaggggggcggagcctatggaaaaacgccagcaacgcggcctttttacggttcctggccttttgctggccttttgctcacatgttctttcctgcgttatcccctgattctgtggataaccgtattaccgccatgcat

SEQ ID NO: 718 - DNA, 6840 bp, Artificial Sequence
  pCzSV5F-I-zGFP
tagttattaatagtaatcaattacggggtcattagttcatagcccatatatggagttccgcgttacataacttacggtaaatggcccgcctggctgaccgcccaacgacccccgcccattgacgtcaataatgacgtatgttcccatagtaacgccaatagggactttccattgacgtcaatgggtggagtatttacggtaaactgcccacttggcagtacatcaagtgtatcatatgccaagtacgccccctattgacgtcaatgacggtaaatggcccgcctggcattatgcccagtacatgaccttatgggactttcctacttggcagtacatctacgtattagtcatcgctattaccatggtgatgcggttttggcagtacatcaatgggcgtggatagcggtttgactcacggggatttccaagtctccaccccattgacgtcaatgggagtttgttttggcaccaaaatcaacgggactttccaaaatgtcgtaacaactccgccccattgacgcaaatgggcggtaggcgtgtacggtgggaggtctatataagcagagctggtttagtgaaccgtcagatccgctagctagaccatggggactattattcaatttctggtggtcagctgtctgctggctggggcaggatctctggaccctgctgccctcatgcagattggggtgattcctaccaatgtcaggcagctcatgtattatacagaagcttcttctgcctttattgttgtgaagctgatgcctactatagacagtcccatctctggctgtaacattacttcaataagttcctataatgcaactgtgactaagctgctccagcccataggggaaaatctggaaactataagaaaccagctgattcctacaagaaggagaaggagatttgctggagttgtgattgggctggctgccctgggtgtggctacagcagcacaagtgacagctgcagtggccctggtcaaagcaaatgagaatgcagctgccatcctgaatctcaagaatgccatccagaagactaatgctgcagttgctgatgtggtgcaagccacacaatctctgggcacagcagtgcaagcagtgcaggatcatatcaactctgttgtgagcccagcaattacagctgccaactgtaaagcacaagatgccatcattggtagcatactcaatctgtatctgactgagctgaccacaatctttcacaaccagattaccaacccagccctgtctccaattaccatccaggccctcaggatactgctgggctctacactgcccactgtggttgaaaagagctttaatacccagatcagtgcagctgagctgctgtcttctggactcctgacagggcagattgttgggctggacctcacctacatgcagatggttatcaagattgaactgcctacactgactgttcagcctgccactcagattattgatctggcaacaatttcagcctttatcaataaccaggaagtgatggctcagctcccaacaagggttatggtgactggcagtctgatacaggcataccctgccagccagtgcaccataacacccaatacagtgtattgcaggtacaatgatgcccaggtgctgtctgatgacacaatggcctgcctgcaggggaatctgactaggtgcacttttagtccagtggtgggcagctttctgactaggtttgtgctgtttgatggcatagtctatgccaactgcaggtccatgctctgcaaatgcatgcagcctgcagcagttattctgcagccaagtagcagtccagtgacagtgatagacatgtataagtgtgtttctctgcaactggacaacctgaggttcaccatcactcagctggcaaatgttacttacaactcaactattaaactggagtcaagtcagattctgagcattgaccctctggatatctcccagaatctggctgcagtgaataagagcctcagtgatgcactccaacatctggcccagtcagacacctatctctcagccattacctctgcaactaccacctcagtcctgagcattatagctatatgtctgggatcactgggcctgattctgatcatactgctgagtgttgtggtgtggaagctgctgacaattgtggtggccaacaggaataggatggaaaattttgtgtaccacaaatagggatccgcccctctccctcccccccccctaacgttactggccgaagccgcttggaataaggccggtgtgcgtttgtctatatgttattttccaccatattgccgtcttttggcaatgtgagggcccggaaacctggccctgtcttcttgacgagcattcctaggggtctttcccctctcgccaaaggaatgcaaggtctgttgaatgtcgtgaaggaagcagttcctctggaagcttcttgaagacaaacaacgtctgtagcgaccctttgcaggcagcggaaccccccacctggcgacaggtgcctctgcggccaaaagccacgtgtataagatacacctgcaaaggcggcacaaccccagtgccacgttgtgagttggatagttgtggaaagagtcaaatggctctcctcaagcgtattcaacaaggggctgaaggatgcccagaaggtaccccattgtatgggatctgatctggggcctcggtgcacatgctttacatgtgtttagtcgaggttaaaaaaacgtctaggccccccgaaccacggggacgtggttttcctttgaaaaacacgatgataatatggccacaaccatggtgagcaagggagaggaactctttacaggtgtggtcccaattctggtggagctggatggagatgtgaatgggcacaaattttctgtcagtggagagggagagggggatgctacctatggcaaactgactctgaagttcatctgcactactggcaagctgcctgtgccatggccaactctggtgacaaccctcacctatggagtccagtgcttttccagatatcctgaccacatgaaacagcatgactttttcaaatctgcaatgcctgagggctatgtgcaagagagaactatctttttcaaggatgatgggaactataagactagggctgaggtgaaatttgaaggagacaccctggtcaataggattgagctcaaggggattgacttcaaggaggatggcaacattctgggccataagctggagtataattacaattcccacaatgtctacattatggctgacaagcagaagaatggcattaaggtcaacttcaagattagacacaacatagaggatggatctgtgcagctggctgaccattaccagcagaatacacctattggggatgggccagtgctgctccctgacaatcactatctgagcacccaatctgctttgtctaaagatcctaatgaaaagagagatcacatggtgctgctggagtttgtaactgctgcaggaattaccttgggtatggatgaactctataagtaagcggccgcgactctagatcataatcagccataccacatttgtagaggttttacttgctttaaaaaacctcccacacctccccctgaacctgaaacataaaatgaatgcaattgttgttgttaacttgtttattgcagcttataatggttacaaataaagcaatagcatcacaaatttcacaaataaagcatttttttcactgcattctagttgtggtttgtccaaactcatcaatgtatcttaaggcgtaaattgtaagcgttaatattttgttaaaattcgcgttaaatttttgttaaatcagctcattttttaaccaataggccgaaatcggcaaaatcccttataaatcaaaagaatagaccgagatagggttgagtgttgttccagtttggaacaagagtccactattaaagaacgtggactccaacgtcaaagggcgaaaaaccgtctatcagggcgatggcccactacgtgaaccatcaccctaatcaagttttttggggtcgaggtgccgtaaagcactaaatcggaaccctaaagggagcccccgatttagagcttgacggggaaagccggcgaacgtggcgagaaaggaagggaagaaagcgaaaggagcgggcgctagggcgctggcaagtgtagcggtcacgctgcgcgtaaccaccacacccgccgcgcttaatgcgccgctacagggcgcgtcaggtggcacttttcggggaaatgtgcgcggaacccctatttgtttatttttctaaatacattcaaatatgtatccgctcatgagacaataaccctgataaatgcttcaataatattgaaaaaggaagagtcctgaggcggaaagaaccagctgtggaatgtgtgtcagttagggtgtggaaagtccccaggctccccagcaggcagaagtatgcaaagcatgcatctcaattagtcagcaaccaggtgtggaaagtccccaggctccccagcaggcagaagtatgcaaagcatgcatctcaattagtcagcaaccatagtcccgcccctaactccgcccatcccgcccctaactccgcccagttccgcccattctccgccccatggctgactaattttttttatttatgcagaggccgaggccgcctcggcctctgagctattccagaagtagtgaggaggcttttttggaggcctaggcttttgcaaagatcgatcaagagacaggatgaggatcgtttcgcatgattgaacaagatggattgcacgcaggttctccggccgcttgggtggagaggctattcggctatgactgggcacaacagacaatcggctgctctgatgccgccgtgttccggctgtcagcgcaggggcgcccggttctttttgtcaagaccgacctgtccggtgccctgaatgaactgcaagacgaggcagcgcggctatcgtggctggccacgacgggcgttccttgcgcagctgtgctcgacgttgtcactgaagcgggaagggactggctgctattgggcgaagtgccggggcaggatctcctgtcatctcaccttgctcctgccgagaaagtatccatcatggctgatgcaatgcggcggctgcatacgcttgatccggctacctgcccattcgaccaccaagcgaaacatcgcatcgagcgagcacgtactcggatggaagccggtcttgtcgatcaggatgatctggacgaagagcatcaggggctcgcgccagccgaactgttcgccaggctcaaggcgagcatgcccgacggcgaggatctcgtcgtgacccatggcgatgcctgcttgccgaatatcatggtggaaaatggccgcttttctggattcatcgactgtggccggctgggtgtggcggaccgctatcaggacatagcgttggctacccgtgatattgctgaagagcttggcggcgaatgggctgaccgcttcctcgtgctttacggtatcgccgctcccgattcgcagcgcatcgccttctatcgccttcttgacgagttcttctgagcgggactctggggttcgaaatgaccgaccaagcgacgcccaacctgccatcacgagatttcgattccaccgccgccttctatgaaaggttgggcttcggaatcgttttccgggacgccggctggatgatcctccagcgcggggatctcatgctggagttcttcgcccaccctagggggaggctaactgaaacacggaaggagacaataccggaaggaacccgcgctatgacggcaataaaaagacagaataaaacgcacggtgttgggtcgtttgttcataaacgcggggttcggtcccagggctggcactctgtcgataccccaccgagaccccattggggccaatacgcccgcgtttcttccttttccccaccccaccccccaagttcgggtgaaggcccagggctcgcagccaacgtcggggcggcaggccctgccatagcctcaggttactcatatatactttagattgatttaaaacttcatttttaatttaaaaggatctaggtgaagatcctttttgataatctcatgaccaaaatcccttaacgtgagttttcgttccactgagcgtcagaccccgtagaaaagatcaaaggatcttcttgagatcctttttttctgcgcgtaatctgctgcttgcaaacaaaaaaaccaccgctaccagcggtggtttgtttgccggatcaagagctaccaactctttttccgaaggtaactggcttcagcagagcgcagataccaaatactgtccttctagtgtagccgtagttaggccaccacttcaagaactctgtagcaccgcctacatacctcgctctgctaatcctgttaccagtggctgctgccagtggcgataagtcgtgtcttaccgggttggactcaagacgatagttaccggataaggcgcagcggtcgggctgaacggggggttcgtgcacacagcccagcttggagcgaacgacctacaccgaactgagatacctacagcgtgagctatgagaaagcgccacgcttcccgaagggagaaaggcggacaggtatccggtaagcggcagggtcggaacaggagagcgcacgagggagcttccagggggaaacgcctggtatctttatagtcctgtcgggtttcgccacctctgacttgagcgtcgatttttgtgatgctcgtcaggggggcggagcctatggaaaaacgccagcaacgcggcctttttacggttcctggccttttgctggccttttgctcacatgttctttcctgcgttatcccctgattctgtggataaccgtattaccgccatgcat

SEQ ID NO: 719 - DNA, 7362 bp, Artificial Sequence
  pCzGFP-I-T-BB4
ttcctattaatagtaatcaattacggggtcattagttcatagcccatatatggagttccgcgttacataacttacggtaaatggcccgcctggctgaccgcccaacgacccccgcccattgacgtcaataatgacgtatgttcccatagtaacgccaatagggactttccattgacgtcaatgggtggagtatttacggtaaactgcccacttggcagtacatcaagtgtatcatatgccaagtacgccccctattgacgtcaatgacggtaaatggcccgcctggcattatgcccagtacatgaccttatgggactttcctacttggcagtacatctacgtattagtcatcgctattaccatggtgatgcggttttggcagtacatcaatgggcgtggatagcggtttgactcacggggatttccaagtctccaccccattgacgtcaatgggagtttgttttggcaccaaaatcaacgggactttccaaaatgtcgtaacaactccgccccattgacgcaaatgggcggtaggcgtgtacggtgggaggtctatataagcagagctggtttagtgaaccgtcagatccgctagctagaccatggtgagcaagggagaggaactctttacaggtgtggtcccaattctggtggagctggatggagatgtgaatgggcacaaattttctgtcagtggagagggagagggggatgctacctatggcaaactgactctgaagttcatctgcactactggcaagctgcctgtgccatggccaactctggtgacaaccctcacctatggagtccagtgcttttccagatatcctgaccacatgaaacagcatgactttttcaaatctgcaatgcctgagggctatgtgcaagagagaactatctttttcaaggatgatgggaactataagactagggctgaggtgaaatttgaaggagacaccctggtcaataggattgagctcaaggggattgacttcaaggaggatggcaacattctgggccataagctggagtataattacaattcccacaatgtctacattatggctgacaagcagaagaatggcattaaggtcaacttcaagattagacacaacatagaggatggatctgtgcagctggctgaccattaccagcagaatacacctattggggatgggccagtgctgctccctgacaatcactatctgagcacccaatctgctttgtctaaagatcctaatgaaaagagagatcacatggtgctgctggagtttgtaactgctgcaggaattaccttgggtatggatgaactctataagtaaggatccgcccctctccctcccccccccctaacgttactggccgaagccgcttggaataaggccggtgtgcgtttgtctatatgttattttccaccatattgccgtcttttggcaatgtgagggcccggaaacctggccctgtcttcttgacgagcattcctaggggtctttcccctctcgccaaaggaatgcaaggtctgttgaatgtcgtgaaggaagcagttcctctggaagcttcttgaagacaaacaacgtctgtagcgaccctttgcaggcagcggaaccccccacctggcgacaggtgcctctgcggccaaaagccacgtgtataagatacacctgcaaaggcggcacaaccccagtgccacgttgtgagttggatagttgtggaaagagtcaaatggctctcctcaagcgtattcaacaaggggctgaaggatgcccagaaggtaccccattgtatgggatctgatctggggcctcggtgcacatgctttacatgtgtttagtcgaggttaaaaaaacgtctaggccccccgaaccacggggacgtggttttcctttgaaaaacacgatgataatatggccacaaccatggacaaagtgctgaatagggaggaaagtctgcaactgatggatctgttgggacttgagaggtctgcatggggtaatatcccacttatgaggaaagcatacctgaagaagtgtaaagagttccatcctgacaaaggtggagatgaagagaagatgaaaaagatgaacacactgtataagaaaatggaagatggtgtaaagtatgctcaccagccagattttggaggtttttgggatgccacagagatacctacttatggtacagatgagtgggaacagtggtggaatgcatttaatgaagagaatttgttttgctctgaggaaatgcctagttctgatgatgaggccacagctgactcccagcacagtactccacccaagaaaaagagaaaagtggaagacccaaaggatttcccctctgaactcttgtccttcttgtctcatgcagtgttctcaaataggaccctggcttgctttgctatctacactactaaggagaaggcagctctcttgtacaagaaaatcatggaaaagtattctgtcacctttatttccaggcacaactcctataatcataatattctctttttcttgacaccccataggcatagggtgagtgcaattaacaactatgctcagaagttgtgtactttctccttcctgatctgtaagggtgtgaataaggagtatctcatgtattcagccctgaccagagacccctttagtgtgattgaagaatccctgcctggtgggctcaaggagcatgatttcaacccagaagaggctgaagaaacaaaacaggtgagctggaagcttgtgactgaatatgcaatggagacaaagtgtgatgatgtcctgctcctcctgggaatgtacctggaatttcagtatagctttgaaatgtgtctgaaatgtatcaaaaaggaacagccttctcattataagtatcatgaaaagcactatgccaatgcagctatatttgcagattctaaaaaccagaaaaccatttgtcagcaagctgttgacacagttctggccaagaaaagagtagactctctccagcttaccagggagcagatgttgacaaataggttcaatgaccttctggacagaatggacataatgtttggctcaactggatctgcagatatagaggagtggatggctggagtggcctggctgcactgtctcctccctaaaatggacagtgtagtctatgacttccttaagtgtatggtctataatatccctaaaaagagatactggttgttcaagggacccattgattcagggaaaactacccttgctgctgcacttctggaactctgtggtgggaaagctctcaatgtcaacctgccacttgatagactcaactttgagctgggggtggcaattgatcagtttttggtagtgtttgaagatgtgaaaggtacaggaggagagtccagggatttgcctagtggccaaggcatcaacaatctggacaacctcagagactacctggatgggtctgtaaaggtcaaccttgaaaaaaagcatctcaacaagaggactcaaatatttccacctggaatagtcactatgaatgaatattcagtgcccaagaccctccaggctagatttgtcaagcaaattgatttcagacctaaagattatctgaaacattgtttggagaggagtgagttcctccttgagaaaaggattattcagtcaggaatagcactgcttcttatgctgatatggtatagaccagtggctgagtttgcccaaagcattcagagtagaatagttgagtggaaagaaaggcttgacaaggagttttctctttcagtatatcaaaagatgaagttcaatgtggctatgggtattggagtgcttgattggttgagaaacagtgatgatgatgatgaagattctcaggaaaatgctgataaaaatgaggatgggggagagaagaatatggaagattctggtcatgaaactggcattgatagtcagagccaggggagtttccaggctccacagagctcccaaagtgtccatgaccacaaccagccttaccatatatgcagaggttttacttgtttcaagaaacctcccactccccctccagaacctgaaacatgagcggccgcgtggccagacatgataagatacattgatgagtttggacaaaccacaactagaatgcagtgaaaaaaatgctttatttgtgaaatttgtgatgctattgctttatttgtaaccattataagctgcaataaacaagttaacaacaacaattgcattcattttatgtttcaggttcagggggaggtgtgggaggttttttaaagcaagtaaaacctctacaaatgtggtatgggcactataagggcatgcaagtcagtcccgcccctaactccacctggttgcccatcccgcccctaactccgcccagttccgcccattctccgccccatggctgactaattttttttatttatgcagaggccgaggccgcctcggcctctgagctattccagaagtagtgaggaggcttttttggaggcccttaattaaatgacatatctacctaatttgtgtataataaccctgataaatgcttcaataatattgaaaaaggaagagtcctgtataaaaagaaccagctgtggaatgtgtgtcagttagtaggcttatgcaaagtagcccgcccaagagacaggctgaggcccgcccaccatgatagaacaagatggacttcatgctggatctcctgcagcatgggtggaaagactttttggttatgattgggctcagcagaccattggatgttctgatgctgctgtgttcaggcttagtgcacagggtaggccagtgctctttgtgaagactgatctctctggagctttgaatgaactgcaggatgaggctgctaggctttcatggctggccaccacaggtgtcccttgtgctgcagtgttggatgtggttactgaggctgggagggattggctcctcctgggagaagtgccaggtcaggatctgttgagttctcacctggctccagctgaaaaagtctccataatggcagatgctatgagaaggctgcacacattggacccagctacatgcccatttgaccatcaggccaaacacaggattgagagggccagaacaagaatggaggctgggttggtggaccaggatgaccttgatgaggagcatcagggcctggctccagctgaattgtttgccaggctcaaggctagtatgcctgatggggaggatctggtggtaactcatggtgatgcctgtttgcctaacatcatggtggaaaatggaaggttctctggattcattgattgtggaagactgggtgtagctgacaggtatcaggacatagctcttgcaacaagggatattgcagaggagttgggtggagaatgggctgacaggttcctggtcttgtatggcattgctgccccagacagccaaagaattgctttctataggctgttggatgagtttttctaagctcagcacccacaaagctctcaggtcctaagagacactggcacccatatccatgcatcccttgtataaataaagcatccagcaaagctggtaccatgtaaaactgtcttggttgtttccaaggtatagagcatagctcaataggtttttgactttgtcccgcccctctaagtcctgcacacagatactccaatatgacatacagcatgcttgggaactgagtgcccccatgtgggcagagagcaccatgtgccacagtccctgagaagttcttgggaagggtgggcaattgccatgtgtgcctagagaaggttgtttgtaatactgccaagtgccatgtggtgtgatattggctccatgtgccttgtttgtaataacatttccatgtgtcttgggaagaaccatatataagcagagctggtttagtgaaccctcagataggcctagaccatggccagcagtgagaatgtcataacagagttcatgagattcaaggtgaggatggagggaactgtcaatggtcatgagtttgagattgaaggggaaggggagggcagaccctatgagggccacaacacagtcaaattgaaggtgaccaaagggggaccccttccctttgcctgggacatcctgagcccacagtttcagtatggttccaaagtttatgtaaagcaccctgctgacatccctgactacaagaaactgtccttcccagaaggattcaagtgggaaagggtcatgaactttgaggatggaggggttgcaacagtgacccaggacagttctctccaagatggctgtttcatctacaaggtaaaattcattggtgtgaactttccctctgatggcccagtgatgcaaaaaaagaccatgggctgggaagcctcaacagaaaggctgtaccctagagatggagttctcaagggtgagacccacaaagctctaaagctcaaagatgggggccactatctggtggagttcaagagcatctacatggcaaaaaagccagtgcagttgcctggctattactatgtggatgccaagcttgacataacctcacacaatgaagactacactattgtggaacagtatgagaggactgagggaagacatcatctgtttctgtgaattcgcactgcatggacttacctgcctggtggtatcagtcacaggctctgataaggattcagctgttgtataaataaagcatgcagcctagcaggaaccatgttaatctctcttggttgtttccttggaatactcctaagcacattaggtttttagatctgtagaaaagatcaaaggatcttcttgagatcctttttttctgcgcgtaatctgctgcttgcaaacaaaaaaaccaccgctaccagcggtggtttgtttgccggatcaagagctaccaactctttttccgaaggtaactggcttcagcagagcgcagataccaaatactgtccttctagtgtagccgtagttaggccaccacttcaagaactctgtagcaccgcctacatacctcgctctgctaatcctgttaccagtggctgctgccagtggcgataagtcgtgtcttaccgggttggactcaagacgatagttaccggataaggcgcagcggtcgggctgaacggggggttcgtgcacacagcccagcttggagcgaacgacctacaccgaactgagatacctacagcgtgagctatgagaaagcgccacgcttcccgaagggagaaaggcggacaggtatccggtaagcggcagggtcggaacaggagagcgcacgagggagcttccagggggaaacgcctggtatctttatagtcctgtcgggtttcgccacctctgacttgagcgtcgatttttgtgatgctcgtcaggggggcggagcctatggaaaaacgccagcaacgcggcctttttacgg

SEQ ID NO: 720 - DNA, 7219 bp, Artificial Sequence
  pCzGFP-I-T-dSV4-1
ttcctattaatagtaatcaattacggggtcattagttcatagcccatatatggagttccgcgttacataacttacggtaaatggcccgcctggctgaccgcccaacgacccccgcccattgacgtcaataatgacgtatgttcccatagtaacgccaatagggactttccattgacgtcaatgggtggagtatttacggtaaactgcccacttggcagtacatcaagtgtatcatatgccaagtacgccccctattgacgtcaatgacggtaaatggcccgcctggcattatgcccagtacatgaccttatgggactttcctacttggcagtacatctacgtattagtcatcgctattaccatggtgatgcggttttggcagtacatcaatgggcgtggatagcggtttgactcacggggatttccaagtctccaccccattgacgtcaatgggagtttgttttggcaccaaaatcaacgggactttccaaaatgtcgtaacaactccgccccattgacgcaaatgggcggtaggcgtgtacggtgggaggtctatataagcagagctggtttagtgaaccgtcagatccgctagctagaccatggtgagcaagggagaggaactctttacaggtgtggtcccaattctggtggagctggatggagatgtgaatgggcacaaattttctgtcagtggagagggagagggggatgctacctatggcaaactgactctgaagttcatctgcactactggcaagctgcctgtgccatggccaactctggtgacaaccctcacctatggagtccagtgcttttccagatatcctgaccacatgaaacagcatgactttttcaaatctgcaatgcctgagggctatgtgcaagagagaactatctttttcaaggatgatgggaactataagactagggctgaggtgaaatttgaaggagacaccctggtcaataggattgagctcaaggggattgacttcaaggaggatggcaacattctgggccataagctggagtataattacaattcccacaatgtctacattatggctgacaagcagaagaatggcattaaggtcaacttcaagattagacacaacatagaggatggatctgtgcagctggctgaccattaccagcagaatacacctattggggatgggccagtgctgctccctgacaatcactatctgagcacccaatctgctttgtctaaagatcctaatgaaaagagagatcacatggtgctgctggagtttgtaactgctgcaggaattaccttgggtatggatgaactctataagtaaggatccgcccctctccctcccccccccctaacgttactggccgaagccgcttggaataaggccggtgtgcgtttgtctatatgttattttccaccatattgccgtcttttggcaatgtgagggcccggaaacctggccctgtcttcttgacgagcattcctaggggtctttcccctctcgccaaaggaatgcaaggtctgttgaatgtcgtgaaggaagcagttcctctggaagcttcttgaagacaaacaacgtctgtagcgaccctttgcaggcagcggaaccccccacctggcgacaggtgcctctgcggccaaaagccacgtgtataagatacacctgcaaaggcggcacaaccccagtgccacgttgtgagttggatagttgtggaaagagtcaaatggctctcctcaagcgtattcaacaaggggctgaaggatgcccagaaggtaccccattgtatgggatctgatctggggcctcggtgcacatgctttacatgtgtttagtcgaggttaaaaaaacgtctaggccccccgaaccacggggacgtggttttcctttgaaaaacacgatgataatatggccacaaccatggacaaagtgctgaatagggaggaaagtctgcaactgatggatctgttgggacttgagaggtctgcatggggtaatatcccacttatgaggaaagcatacctgaagaagtgtaaagagttccatcctgacaaaggtggagatgaagagaagatgaaaaagatgaacacactgtataagaaaatggaagatggtgtaaagtatgctcaccagccagattttggaggtttttgggatgccacagagatacctacttatggtacagatgagtgggaacagtggtggaatgcatttaatgaagagaatttgttttgctctgaggaaatgcctagttctgatgatgaggccacagctgactcccagcacagtactccacccaagaaaaagagaaaagtggaagacccaaaggatttcccctctgaactcttgtccttcttgtctcatgcagtgttctcaaataggaccctggcttgctttgctatctacactactaaggagaaggcagctctcttgtacaagaaaatcatggaaaagtattctgtcacctttatttccaggcacaactcctataatcataatattctctttttcttgacaccccataggcatagggtgagtgcaattaacaactatgctcagaagttgtgtactttctccttcctgatctgtaagggtgtgaataaggagtatctcatgtattcagccctgaccagagacccctttagtgtgattgaagaatccctgcctggtgggctcaaggagcatgatttcaacccagaagaggctgaagaaacaaaacaggtgagctggaagcttgtgactgaatatgcaatggagacaaagtgtgatgatgtcctgctcctcctgggaatgtacctggaatttcagtatagctttgaaatgtgtctgaaatgtatcaaaaaggaacagccttctcattataagtatcatgaaaagcactatgccaatgcagctatatttgcagattctaaaaaccagaaaaccatttgtcagcaagctgttgacacagttctggccaagaaaagagtagactctctccagcttaccagggagcagatgttgacaaataggttcaatgaccttctggacagaatggacataatgtttggctcaactggatctgcagatatagaggagtggatggctggagtggcctggctgcactgtctcctccctaaaatggacagtgtagtctatgacttccttaagtgtatggtctataatatccctaaaaagagatactggttgttcaagggacccattgattcagggaaaactacccttgctgctgcacttctggaactctgtggtgggaaagctctcaatgtcaacctgccacttgatagactcaactttgagctgggggtggcaattgatcagtttttggtagtgtttgaagatgtgaaaggtacaggaggagagtccagggatttgcctagtggccaaggcatcaacaatctggacaacctcagagactacctggatgggtctgtaaaggtcaaccttgaaaaaaagcatctcaacaagaggactcaaatatttccacctggaatagtcactatgaatgaatattcagtgcccaagaccctccaggctagatttgtcaagcaaattgatttcagacctaaagattatctgaaacattgtttggagaggagtgagttcctccttgagaaaaggattattcagtcaggaatagcactgcttcttatgctgatatggtatagaccagtggctgagtttgcccaaagcattcagagtagaatagttgagtggaaagaaaggcttgacaaggagttttctctttcagtatatcaaaagatgaagttcaatgtggctatgggtattggagtgcttgattggttgagaaacagtgatgatgatgatgaagattctcaggaaaatgctgataaaaatgaggatgggggagagaagaatatggaagattctggtcatgaaactggcattgatagtcagagccaggggagtttccaggctccacagagctcccaaagtgtccatgaccacaaccagccttaccatatatgcagaggttttacttgtttcaagaaacctcccactccccctccagaacctgaaacatgagcggccgcgtggccagacatgataagatacattgatgagtttggacaaaccacaactagaatgcagtgaaaaaaatgctttatttgtgaaatttgtgatgctattgctttatttgtaaccattataagctgcaataaacaagttaacaacaacaattgcattcattttatgtttcaggttcagggggaggtgtgggaggttttttaaagcaagtaaaacctctacaaatgtggtatgggcactataagggcatgcaagtcagtcccgcccctaactcccatatgttaattaaatgacatatctacctaatttgtgtataataaccctgataaatgcttcaataatattgaaaaaggaagagtcctgtataaaaagaaccagctgtggaatgtgtgtcagttagtaggcttatgcaaagtagcccgcccaagagacaggctgaggcccgcccaccatgatagaacaagatggacttcatgctggatctcctgcagcatgggtggaaagactttttggttatgattgggctcagcagaccattggatgttctgatgctgctgtgttcaggcttagtgcacagggtaggccagtgctctttgtgaagactgatctctctggagctttgaatgaactgcaggatgaggctgctaggctttcatggctggccaccacaggtgtcccttgtgctgcagtgttggatgtggttactgaggctgggagggattggctcctcctgggagaagtgccaggtcaggatctgttgagttctcacctggctccagctgaaaaagtctccataatggcagatgctatgagaaggctgcacacattggacccagctacatgcccatttgaccatcaggccaaacacaggattgagagggccagaacaagaatggaggctgggttggtggaccaggatgaccttgatgaggagcatcagggcctggctccagctgaattgtttgccaggctcaaggctagtatgcctgatggggaggatctggtggtaactcatggtgatgcctgtttgcctaacatcatggtggaaaatggaaggttctctggattcattgattgtggaagactgggtgtagctgacaggtatcaggacatagctcttgcaacaagggatattgcagaggagttgggtggagaatgggctgacaggttcctggtcttgtatggcattgctgccccagacagccaaagaattgctttctataggctgttggatgagtttttctaagctcagcacccacaaagctctcaggtcctaagagacactggcacccatatccatgcatcccttgtataaataaagcatccagcaaagctggtaccatgtaaaactgtcttggttgtttccaaggtatagagcatagctcaataggtttttgactttgtcccgcccctctaagtcctgcacacagatactccaatatgacatacagcatgcttgggaactgagtgcccccatgtgggcagagagcaccatgtgccacagtccctgagaagttcttgggaagggtgggcaattgccatgtgtgcctagagaaggttgtttgtaatactgccaagtgccatgtggtgtgatattggctccatgtgccttgtttgtaataacatttccatgtgtcttgggaagaaccatatataagcagagctggtttagtgaaccctcagataggcctagaccatggccagcagtgagaatgtcataacagagttcatgagattcaaggtgaggatggagggaactgtcaatggtcatgagtttgagattgaaggggaaggggagggcagaccctatgagggccacaacacagtcaaattgaaggtgaccaaagggggaccccttccctttgcctgggacatcctgagcccacagtttcagtatggttccaaagtttatgtaaagcaccctgctgacatccctgactacaagaaactgtccttcccagaaggattcaagtgggaaagggtcatgaactttgaggatggaggggttgcaacagtgacccaggacagttctctccaagatggctgtttcatctacaaggtaaaattcattggtgtgaactttccctctgatggcccagtgatgcaaaaaaagaccatgggctgggaagcctcaacagaaaggctgtaccctagagatggagttctcaagggtgagacccacaaagctctaaagctcaaagatgggggccactatctggtggagttcaagagcatctacatggcaaaaaagccagtgcagttgcctggctattactatgtggatgccaagcttgacataacctcacacaatgaagactacactattgtggaacagtatgagaggactgagggaagacatcatctgtttctgtgaattcgcactgcatggacttacctgcctggtggtatcagtcacaggctctgataaggattcagctgttgtataaataaagcatgcagcctagcaggaaccatgttaatctctcttggttgtttccttggaatactcctaagcacattaggtttttagatctgtagaaaagatcaaaggatcttcttgagatcctttttttctgcgcgtaatctgctgcttgcaaacaaaaaaaccaccgctaccagcggtggtttgtttgccggatcaagagctaccaactctttttccgaaggtaactggcttcagcagagcgcagataccaaatactgtccttctagtgtagccgtagttaggccaccacttcaagaactctgtagcaccgcctacatacctcgctctgctaatcctgttaccagtggctgctgccagtggcgataagtcgtgtcttaccgggttggactcaagacgatagttaccggataaggcgcagcggtcgggctgaacggggggttcgtgcacacagcccagcttggagcgaacgacctacaccgaactgagatacctacagcgtgagctatgagaaagcgccacgcttcccgaagggagaaaggcggacaggtatccggtaagcggcagggtcggaacaggagagcgcacgagggagcttccagggggaaacgcctggtatctttatagtcctgtcgggtttcgccacctctgacttgagcgtcgatttttgtgatgctcgtcaggggggcggagcctatggaaaaacgccagcaacgcggcctttttacgg

SEQ ID NO: 721 - DNA, 7352 bp, Artificial Sequence
  pCzGFP-I-T-dSV4-2
ttcctattaatagtaatcaattacggggtcattagttcatagcccatatatggagttccgcgttacataacttacggtaaatggcccgcctggctgaccgcccaacgacccccgcccattgacgtcaataatgacgtatgttcccatagtaacgccaatagggactttccattgacgtcaatgggtggagtatttacggtaaactgcccacttggcagtacatcaagtgtatcatatgccaagtacgccccctattgacgtcaatgacggtaaatggcccgcctggcattatgcccagtacatgaccttatgggactttcctacttggcagtacatctacgtattagtcatcgctattaccatggtgatgcggttttggcagtacatcaatgggcgtggatagcggtttgactcacggggatttccaagtctccaccccattgacgtcaatgggagtttgttttggcaccaaaatcaacgggactttccaaaatgtcgtaacaactccgccccattgacgcaaatgggcggtaggcgtgtacggtgggaggtctatataagcagagctggtttagtgaaccgtcagatccgctagctagaccatggtgagcaagggagaggaactctttacaggtgtggtcccaattctggtggagctggatggagatgtgaatgggcacaaattttctgtcagtggagagggagagggggatgctacctatggcaaactgactctgaagttcatctgcactactggcaagctgcctgtgccatggccaactctggtgacaaccctcacctatggagtccagtgcttttccagatatcctgaccacatgaaacagcatgactttttcaaatctgcaatgcctgagggctatgtgcaagagagaactatctttttcaaggatgatgggaactataagactagggctgaggtgaaatttgaaggagacaccctggtcaataggattgagctcaaggggattgacttcaaggaggatggcaacattctgggccataagctggagtataattacaattcccacaatgtctacattatggctgacaagcagaagaatggcattaaggtcaacttcaagattagacacaacatagaggatggatctgtgcagctggctgaccattaccagcagaatacacctattggggatgggccagtgctgctccctgacaatcactatctgagcacccaatctgctttgtctaaagatcctaatgaaaagagagatcacatggtgctgctggagtttgtaactgctgcaggaattaccttgggtatggatgaactctataagtaaggatccgcccctctccctcccccccccctaacgttactggccgaagccgcttggaataaggccggtgtgcgtttgtctatatgttattttccaccatattgccgtcttttggcaatgtgagggcccggaaacctggccctgtcttcttgacgagcattcctaggggtctttcccctctcgccaaaggaatgcaaggtctgttgaatgtcgtgaaggaagcagttcctctggaagcttcttgaagacaaacaacgtctgtagcgaccctttgcaggcagcggaaccccccacctggcgacaggtgcctctgcggccaaaagccacgtgtataagatacacctgcaaaggcggcacaaccccagtgccacgttgtgagttggatagttgtggaaagagtcaaatggctctcctcaagcgtattcaacaaggggctgaaggatgcccagaaggtaccccattgtatgggatctgatctggggcctcggtgcacatgctttacatgtgtttagtcgaggttaaaaaaacgtctaggccccccgaaccacggggacgtggttttcctttgaaaaacacgatgataatatggccacaaccatggacaaagtgctgaatagggaggaaagtctgcaactgatggatctgttgggacttgagaggtctgcatggggtaatatcccacttatgaggaaagcatacctgaagaagtgtaaagagttccatcctgacaaaggtggagatgaagagaagatgaaaaagatgaacacactgtataagaaaatggaagatggtgtaaagtatgctcaccagccagattttggaggtttttgggatgccacagagatacctacttatggtacagatgagtgggaacagtggtggaatgcatttaatgaagagaatttgttttgctctgaggaaatgcctagttctgatgatgaggccacagctgactcccagcacagtactccacccaagaaaaagagaaaagtggaagacccaaaggatttcccctctgaactcttgtccttcttgtctcatgcagtgttctcaaataggaccctggcttgctttgctatctacactactaaggagaaggcagctctcttgtacaagaaaatcatggaaaagtattctgtcacctttatttccaggcacaactcctataatcataatattctctttttcttgacaccccataggcatagggtgagtgcaattaacaactatgctcagaagttgtgtactttctccttcctgatctgtaagggtgtgaataaggagtatctcatgtattcagccctgaccagagacccctttagtgtgattgaagaatccctgcctggtgggctcaaggagcatgatttcaacccagaagaggctgaagaaacaaaacaggtgagctggaagcttgtgactgaatatgcaatggagacaaagtgtgatgatgtcctgctcctcctgggaatgtacctggaatttcagtatagctttgaaatgtgtctgaaatgtatcaaaaaggaacagccttctcattataagtatcatgaaaagcactatgccaatgcagctatatttgcagattctaaaaaccagaaaaccatttgtcagcaagctgttgacacagttctggccaagaaaagagtagactctctccagcttaccagggagcagatgttgacaaataggttcaatgaccttctggacagaatggacataatgtttggctcaactggatctgcagatatagaggagtggatggctggagtggcctggctgcactgtctcctccctaaaatggacagtgtagtctatgacttccttaagtgtatggtctataatatccctaaaaagagatactggttgttcaagggacccattgattcagggaaaactacccttgctgctgcacttctggaactctgtggtgggaaagctctcaatgtcaacctgccacttgatagactcaactttgagctgggggtggcaattgatcagtttttggtagtgtttgaagatgtgaaaggtacaggaggagagtccagggatttgcctagtggccaaggcatcaacaatctggacaacctcagagactacctggatgggtctgtaaaggtcaaccttgaaaaaaagcatctcaacaagaggactcaaatatttccacctggaatagtcactatgaatgaatattcagtgcccaagaccctccaggctagatttgtcaagcaaattgatttcagacctaaagattatctgaaacattgtttggagaggagtgagttcctccttgagaaaaggattattcagtcaggaatagcactgcttcttatgctgatatggtatagaccagtggctgagtttgcccaaagcattcagagtagaatagttgagtggaaagaaaggcttgacaaggagttttctctttcagtatatcaaaagatgaagttcaatgtggctatgggtattggagtgcttgattggttgagaaacagtgatgatgatgatgaagattctcaggaaaatgctgataaaaatgaggatgggggagagaagaatatggaagattctggtcatgaaactggcattgatagtcagagccaggggagtttccaggctccacagagctcccaaagtgtccatgaccacaaccagccttaccatatatgcagaggttttacttgtttcaagaaacctcccactccccctccagaacctgaaacatgagcggccgcgtggccagacatgataagatacattgatgagtttggacaaaccacaactagaatgcagtgaaaaaaatgctttatttgtgaaatttgtgatgctattgctttatttgtaaccattataagctgcaataaacaagttaacaacaacaattgcattcattttatgtttcaggttcagggggaggtgtgggaggttttttaaagcaagtaaaacctctacaaatgtggtatgggcactataagggcatgcaagtcagtcccgcccctaactccacctggttgcccatcccgcccctaactccgcccagttccgcccattctccgccccatggctgactaattttttttatttatgcaggaggggaggaggtgagctattccagaagtagtgaggaggcttttttggaggcccttaattaaatgacatatctacctaatttgtgtataataaccctgataaatgcttcaataatattgaaaaaggaagagtcctgtataaaaagaaccagctgtggaatgtgtgtcagttagtaggcttatgcaaagtagcccgcccaagagacaggctgaggcccgcccaccatgatagaacaagatggacttcatgctggatctcctgcagcatgggtggaaagactttttggttatgattgggctcagcagaccattggatgttctgatgctgctgtgttcaggcttagtgcacagggtaggccagtgctctttgtgaagactgatctctctggagctttgaatgaactgcaggatgaggctgctaggctttcatggctggccaccacaggtgtcccttgtgctgcagtgttggatgtggttactgaggctgggagggattggctcctcctgggagaagtgccaggtcaggatctgttgagttctcacctggctccagctgaaaaagtctccataatggcagatgctatgagaaggctgcacacattggacccagctacatgcccatttgaccatcaggccaaacacaggattgagagggccagaacaagaatggaggctgggttggtggaccaggatgaccttgatgaggagcatcagggcctggctccagctgaattgtttgccaggctcaaggctagtatgcctgatggggaggatctggtggtaactcatggtgatgcctgtttgcctaacatcatggtggaaaatggaaggttctctggattcattgattgtggaagactgggtgtagctgacaggtatcaggacatagctcttgcaacaagggatattgcagaggagttgggtggagaatgggctgacaggttcctggtcttgtatggcattgctgccccagacagccaaagaattgctttctataggctgttggatgagtttttctaagctcagcacccacaaagctctcaggtcctaagagacactggcacccatatccatgcatcccttgtataaataaagcatccagcaaagctggtaccatgtaaaactgtcttggttgtttccaaggtatagagcatagctcaataggtttttgactttgtcccgcccctctaagtcctgcacacagatactccaatatgacatacagcatgcttgggaactgagtgcccccatgtgggcagagagcaccatgtgccacagtccctgagaagttcttgggaagggtgggcaattgccatgtgtgcctagagaaggttgtttgtaatactgccaagtgccatgtggtgtgatattggctccatgtgccttgtttgtaataacatttccatgtgtcttgggaagaaccatatataagcagagctggtttagtgaaccctcagataggcctagaccatggccagcagtgagaatgtcataacagagttcatgagattcaaggtgaggatggagggaactgtcaatggtcatgagtttgagattgaaggggaaggggagggcagaccctatgagggccacaacacagtcaaattgaaggtgaccaaagggggaccccttccctttgcctgggacatcctgagcccacagtttcagtatggttccaaagtttatgtaaagcaccctgctgacatccctgactacaagaaactgtccttcccagaaggattcaagtgggaaagggtcatgaactttgaggatggaggggttgcaacagtgacccaggacagttctctccaagatggctgtttcatctacaaggtaaaattcattggtgtgaactttccctctgatggcccagtgatgcaaaaaaagaccatgggctgggaagcctcaacagaaaggctgtaccctagagatggagttctcaagggtgagacccacaaagctctaaagctcaaagatgggggccactatctggtggagttcaagagcatctacatggcaaaaaagccagtgcagttgcctggctattactatgtggatgccaagcttgacataacctcacacaatgaagactacactattgtggaacagtatgagaggactgagggaagacatcatctgtttctgtgaattcgcactgcatggacttacctgcctggtggtatcagtcacaggctctgataaggattcagctgttgtataaataaagcatgcagcctagcaggaaccatgttaatctctcttggttgtttccttggaatactcctaagcacattaggtttttagatctgtagaaaagatcaaaggatcttcttgagatcctttttttctgcgcgtaatctgctgcttgcaaacaaaaaaaccaccgctaccagcggtggtttgtttgccggatcaagagctaccaactctttttccgaaggtaactggcttcagcagagcgcagataccaaatactgtccttctagtgtagccgtagttaggccaccacttcaagaactctgtagcaccgcctacatacctcgctctgctaatcctgttaccagtggctgctgccagtggcgataagtcgtgtcttaccgggttggactcaagacgatagttaccggataaggcgcagcggtcgggctgaacggggggttcgtgcacacagcccagcttggagcgaacgacctacaccgaactgagatacctacagcgtgagctatgagaaagcgccacgcttcccgaagggagaaaggcggacaggtatccggtaagcggcagggtcggaacaggagagcgcacgagggagcttccagggggaaacgcctggtatctttatagtcctgtcgggtttcgccacctctgacttgagcgtcgatttttgtgatgctcgtcaggggggcggagcctatggaaaaacgccagcaacgcggcctttttacgg

SEQ ID NO: 722 - DNA, 8643 bp, Artificial Sequence
  pC-GALV-I-T-BB4
ttcctattaatagtaatcaattacggggtcattagttcatagcccatatatggagttccgcgttacataacttacggtaaatggcccgcctggctgaccgcccaacgacccccgcccattgacgtcaataatgacgtatgttcccatagtaacgccaatagggactttccattgacgtcaatgggtggagtatttacggtaaactgcccacttggcagtacatcaagtgtatcatatgccaagtacgccccctattgacgtcaatgacggtaaatggcccgcctggcattatgcccagtacatgaccttatgggactttcctacttggcagtacatctacgtattagtcatcgctattaccatggtgatgcggttttggcagtacatcaatgggcgtggatagcggtttgactcacggggatttccaagtctccaccccattgacgtcaatgggagtttgttttggcaccaaaatcaacgggactttccaaaatgtcgtaacaactccgccccattgacgcaaatgggcggtaggcgtgtacggtgggaggtctatataagcagagctggtttagtgaaccgtcagatccgctagcaccatggtcctgctgccaggctcaatgctgctgaccagcaatctccaccacctgagacaccagatgtcacctgggtcctggaagagacttatcattcttctgtcctgtgtgtttgggggtggaggcaccagcctgcaaaataagaacccacatcagcccatgaccctcacctggcaggtcctgagccagacaggtgatgttgtctgggataccaaagcagtccagcccccctggacttggtggcccaccttgaaacctgatgtctgtgccctggcagctagtctggagagctgggacatcccaggcactgatgtcagcagcagcaagagggttaggccacctgacagtgactacactgcagcctacaagcagatcacctggggagccattggctgctcctaccctagagctagaaccagaatggcctccagtaccttctatgtctgccctagagatggcagaactctgtctgaggccaggagatgtggtggactggaatccctctactgcaaagagtgggactgtgagactactggcacaggctattggttgtccaagtcatccaaggacttgatcactgtgaagtgggatcagaattcagagtggacccagaaatttcagcaatgccaccagacaggctggtgcaaccccttgaagattgactttacagataaggggaagctcagtaaagactggatcacaggcaaaacctggggactgaggttctatgtttctggccatccaggtgttcagttcaccatcagattgaaaatcaccaatatgccagctgtggcagtgggtcctgaccttgtgctggtggaacagggcccacccaggacatccttggccttgcctccacccctccctcccagggaagccccccctccaagcttgcctgactccaattctacagctctggctactagtgcccaaactcctactgtgaggaagaccattgtcacactcaatacaccccctccaactacaggagacaggttgtttgaccttgtgcaaggtgccttccttacacttaatgccaccaaccctggagccacagaaagttgttggctgtgcctggcaatgggtccaccctactatgaggcaattgcaagttctggtgaagtggcatatagcactgacctggatagatgtaggtgggggacccagggaaaactcacacttactgaagtgagtgggcatggcctgtgcattggaaaagtcccattcacacaccaacatctgtgcaaccaaacactctccatcaactcttctggtgaccaccagtacctgcttccaagcaaccacagctggtgggcctgcagcactgggctgaccccctgcctgagcacctctgtgttcaatcagacaagagatttctgtatccaggtgcagctcattcccagaatctactactatcctgaggaggtgctgctgcaagcctatgacaacagtcatcccaggactaagagggaagcagtgagtctcaccctggctgttctgctgggcctgggaatcacagctgggattggtacaggctcaacagcccttatcaagggccccattgacctgcagcaaggactgacttcccttcagattgcaattgatgctgatctgagagccctgcaggattctgtgtccaaactggaggacagccttacctctctctcagaagtggttcttcagaacaggagaggactggacttgctctttctcaaagagggagggctttgtgctgccctcaaggaggagtgttgcttttacattgatcattctggggctgttagagattcaatgaaaaagctcaaggagaaattggataaaaggcagctggaaagacagaagtctcaaaactggtatgaagggtggttcaacaatagtccttggttcactaccttgctgagcactattgctggcccactcttgctgctgttgctcctgctcatcctggggccctgtatcatcaacaagctggtgcagtttatcaatgacaggatcagtgcctgctgaggatccgcccctctccctcccccccccctaacgttactggccgaagccgcttggaataaggccggtgtgcgtttgtctatatgttattttccaccatattgccgtcttttggcaatgtgagggcccggaaacctggccctgtcttcttgacgagcattcctaggggtctttcccctctcgccaaaggaatgcaaggtctgttgaatgtcgtgaaggaagcagttcctctggaagcttcttgaagacaaacaacgtctgtagcgaccctttgcaggcagcggaaccccccacctggcgacaggtgcctctgcggccaaaagccacgtgtataagatacacctgcaaaggcggcacaaccccagtgccacgttgtgagttggatagttgtggaaagagtcaaatggctctcctcaagcgtattcaacaaggggctgaaggatgcccagaaggtaccccattgtatgggatctgatctggggcctcggtgcacatgctttacatgtgtttagtcgaggttaaaaaaacgtctaggccccccgaaccacggggacgtggttttcctttgaaaaacacgatgataatatggccacaaccatggacaaagtgctgaatagggaggaaagtctgcaactgatggatctgttgggacttgagaggtctgcatggggtaatatcccacttatgaggaaagcatacctgaagaagtgtaaagagttccatcctgacaaaggtggagatgaagagaagatgaaaaagatgaacacactgtataagaaaatggaagatggtgtaaagtatgctcaccagccagattttggaggtttttgggatgccacagagatacctacttatggtacagatgagtgggaacagtggtggaatgcatttaatgaagagaatttgttttgctctgaggaaatgcctagttctgatgatgaggccacagctgactcccagcacagtactccacccaagaaaaagagaaaagtggaagacccaaaggatttcccctctgaactcttgtccttcttgtctcatgcagtgttctcaaataggaccctggcttgctttgctatctacactactaaggagaaggcagctctcttgtacaagaaaatcatggaaaagtattctgtcacctttatttccaggcacaactcctataatcataatattctctttttcttgacaccccataggcatagggtgagtgcaattaacaactatgctcagaagttgtgtactttctccttcctgatctgtaagggtgtgaataaggagtatctcatgtattcagccctgaccagagacccctttagtgtgattgaagaatccctgcctggtgggctcaaggagcatgatttcaacccagaagaggctgaagaaacaaaacaggtgagctggaagcttgtgactgaatatgcaatggagacaaagtgtgatgatgtcctgctcctcctgggaatgtacctggaatttcagtatagctttgaaatgtgtctgaaatgtatcaaaaaggaacagccttctcattataagtatcatgaaaagcactatgccaatgcagctatatttgcagattctaaaaaccagaaaaccatttgtcagcaagctgttgacacagttctggccaagaaaagagtagactctctccagcttaccagggagcagatgttgacaaataggttcaatgaccttctggacagaatggacataatgtttggctcaactggatctgcagatatagaggagtggatggctggagtggcctggctgcactgtctcctccctaaaatggacagtgtagtctatgacttccttaagtgtatggtctataatatccctaaaaagagatactggttgttcaagggacccattgattcagggaaaactacccttgctgctgcacttctggaactctgtggtgggaaagctctcaatgtcaacctgccacttgatagactcaactttgagctgggggtggcaattgatcagtttttggtagtgtttgaagatgtgaaaggtacaggaggagagtccagggatttgcctagtggccaaggcatcaacaatctggacaacctcagagactacctggatgggtctgtaaaggtcaaccttgaaaaaaagcatctcaacaagaggactcaaatatttccacctggaatagtcactatgaatgaatattcagtgcccaagaccctccaggctagatttgtcaagcaaattgatttcagacctaaagattatctgaaacattgtttggagaggagtgagttcctccttgagaaaaggattattcagtcaggaatagcactgcttcttatgctgatatggtatagaccagtggctgagtttgcccaaagcattcagagtagaatagttgagtggaaagaaaggcttgacaaggagttttctctttcagtatatcaaaagatgaagttcaatgtggctatgggtattggagtgcttgattggttgagaaacagtgatgatgatgatgaagattctcaggaaaatgctgataaaaatgaggatgggggagagaagaatatggaagattctggtcatgaaactggcattgatagtcagagccaggggagtttccaggctccacagagctcccaaagtgtccatgaccacaaccagccttaccatatatgcagaggttttacttgtttcaagaaacctcccactccccctccagaacctgaaacatgagcggccgcgtggccagacatgataagatacattgatgagtttggacaaaccacaactagaatgcagtgaaaaaaatgctttatttgtgaaatttgtgatgctattgctttatttgtaaccattataagctgcaataaacaagttaacaacaacaattgcattcattttatgtttcaggttcagggggaggtgtgggaggttttttaaagcaagtaaaacctctacaaatgtggtatgggcactataagggcatgcaagtcagtcccgcccctaactccacctggttgcccatcccgcccctaactccgcccagttccgcccattctccgccccatggctgactaattttttttatttatgcagaggccgaggccgcctcggcctctgagctattccagaagtagtgaggaggcttttttggaggcccttaattaaatgacatatctacctaatttgtgtataataaccctgataaatgcttcaataatattgaaaaaggaagagtcctgtataaaaagaaccagctgtggaatgtgtgtcagttagtaggcttatgcaaagtagcccgcccaagagacaggctgaggcccgcccaccatgatagaacaagatggacttcatgctggatctcctgcagcatgggtggaaagactttttggttatgattgggctcagcagaccattggatgttctgatgctgctgtgttcaggcttagtgcacagggtaggccagtgctctttgtgaagactgatctctctggagctttgaatgaactgcaggatgaggctgctaggctttcatggctggccaccacaggtgtcccttgtgctgcagtgttggatgtggttactgaggctgggagggattggctcctcctgggagaagtgccaggtcaggatctgttgagttctcacctggctccagctgaaaaagtctccataatggcagatgctatgagaaggctgcacacattggacccagctacatgcccatttgaccatcaggccaaacacaggattgagagggccagaacaagaatggaggctgggttggtggaccaggatgaccttgatgaggagcatcagggcctggctccagctgaattgtttgccaggctcaaggctagtatgcctgatggggaggatctggtggtaactcatggtgatgcctgtttgcctaacatcatggtggaaaatggaaggttctctggattcattgattgtggaagactgggtgtagctgacaggtatcaggacatagctcttgcaacaagggatattgcagaggagttgggtggagaatgggctgacaggttcctggtcttgtatggcattgctgccccagacagccaaagaattgctttctataggctgttggatgagtttttctaagctcagcacccacaaagctctcaggtcctaagagacactggcacccatatccatgcatcccttgtataaataaagcatccagcaaagctggtaccatgtaaaactgtcttggttgtttccaaggtatagagcatagctcaataggtttttgactttgtcccgcccctctaagtcctgcacacagatactccaatatgacatacagcatgcttgggaactgagtgcccccatgtgggcagagagcaccatgtgccacagtccctgagaagttcttgggaagggtgggcaattgccatgtgtgcctagagaaggttgtttgtaatactgccaagtgccatgtggtgtgatattggctccatgtgccttgtttgtaataacatttccatgtgtcttgggaagaaccatatataagcagagctggtttagtgaaccctcagataggcctagaccatggccagcagtgagaatgtcataacagagttcatgagattcaaggtgaggatggagggaactgtcaatggtcatgagtttgagattgaaggggaaggggagggcagaccctatgagggccacaacacagtcaaattgaaggtgaccaaagggggaccccttccctttgcctgggacatcctgagcccacagtttcagtatggttccaaagtttatgtaaagcaccctgctgacatccctgactacaagaaactgtccttcccagaaggattcaagtgggaaagggtcatgaactttgaggatggaggggttgcaacagtgacccaggacagttctctccaagatggctgtttcatctacaaggtaaaattcattggtgtgaactttccctctgatggcccagtgatgcaaaaaaagaccatgggctgggaagcctcaacagaaaggctgtaccctagagatggagttctcaagggtgagacccacaaagctctaaagctcaaagatgggggccactatctggtggagttcaagagcatctacatggcaaaaaagccagtgcagttgcctggctattactatgtggatgccaagcttgacataacctcacacaatgaagactacactattgtggaacagtatgagaggactgagggaagacatcatctgtttctgtgaattcgcactgcatggacttacctgcctggtggtatcagtcacaggctctgataaggattcagctgttgtataaataaagcatgcagcctagcaggaaccatgttaatctctcttggttgtttccttggaatactcctaagcacattaggtttttagatctgtagaaaagatcaaaggatcttcttgagatcctttttttctgcgcgtaatctgctgcttgcaaacaaaaaaaccaccgctaccagcggtggtttgtttgccggatcaagagctaccaactctttttccgaaggtaactggcttcagcagagcgcagataccaaatactgtccttctagtgtagccgtagttaggccaccacttcaagaactctgtagcaccgcctacatacctcgctctgctaatcctgttaccagtggctgctgccagtggcgataagtcgtgtcttaccgggttggactcaagacgatagttaccggataaggcgcagcggtcgggctgaacggggggttcgtgcacacagcccagcttggagcgaacgacctacaccgaactgagatacctacagcgtgagctatgagaaagcgccacgcttcccgaagggagaaaggcggacaggtatccggtaagcggcagggtcggaacaggagagcgcacgagggagcttccagggggaaacgcctggtatctttatagtcctgtcgggtttcgccacctctgacttgagcgtcgatttttgtgatgctcgtcaggggggcggagcctatggaaaaacgccagcaacgcggcctttttacgg

SEQ ID NO: 723 - DNA, 8500 bp, Artificial Sequence
  pC-GALV-I-T-dSV4
ttcctattaatagtaatcaattacggggtcattagttcatagcccatatatggagttccgcgttacataacttacggtaaatggcccgcctggctgaccgcccaacgacccccgcccattgacgtcaataatgacgtatgttcccatagtaacgccaatagggactttccattgacgtcaatgggtggagtatttacggtaaactgcccacttggcagtacatcaagtgtatcatatgccaagtacgccccctattgacgtcaatgacggtaaatggcccgcctggcattatgcccagtacatgaccttatgggactttcctacttggcagtacatctacgtattagtcatcgctattaccatggtgatgcggttttggcagtacatcaatgggcgtggatagcggtttgactcacggggatttccaagtctccaccccattgacgtcaatgggagtttgttttggcaccaaaatcaacgggactttccaaaatgtcgtaacaactccgccccattgacgcaaatgggcggtaggcgtgtacggtgggaggtctatataagcagagctggtttagtgaaccgtcagatccgctagcaccatggtcctgctgccaggctcaatgctgctgaccagcaatctccaccacctgagacaccagatgtcacctgggtcctggaagagacttatcattcttctgtcctgtgtgtttgggggtggaggcaccagcctgcaaaataagaacccacatcagcccatgaccctcacctggcaggtcctgagccagacaggtgatgttgtctgggataccaaagcagtccagcccccctggacttggtggcccaccttgaaacctgatgtctgtgccctggcagctagtctggagagctgggacatcccaggcactgatgtcagcagcagcaagagggttaggccacctgacagtgactacactgcagcctacaagcagatcacctggggagccattggctgctcctaccctagagctagaaccagaatggcctccagtaccttctatgtctgccctagagatggcagaactctgtctgaggccaggagatgtggtggactggaatccctctactgcaaagagtgggactgtgagactactggcacaggctattggttgtccaagtcatccaaggacttgatcactgtgaagtgggatcagaattcagagtggacccagaaatttcagcaatgccaccagacaggctggtgcaaccccttgaagattgactttacagataaggggaagctcagtaaagactggatcacaggcaaaacctggggactgaggttctatgtttctggccatccaggtgttcagttcaccatcagattgaaaatcaccaatatgccagctgtggcagtgggtcctgaccttgtgctggtggaacagggcccacccaggacatccttggccttgcctccacccctccctcccagggaagccccccctccaagcttgcctgactccaattctacagctctggctactagtgcccaaactcctactgtgaggaagaccattgtcacactcaatacaccccctccaactacaggagacaggttgtttgaccttgtgcaaggtgccttccttacacttaatgccaccaaccctggagccacagaaagttgttggctgtgcctggcaatgggtccaccctactatgaggcaattgcaagttctggtgaagtggcatatagcactgacctggatagatgtaggtgggggacccagggaaaactcacacttactgaagtgagtgggcatggcctgtgcattggaaaagtcccattcacacaccaacatctgtgcaaccaaacactctccatcaactcttctggtgaccaccagtacctgcttccaagcaaccacagctggtgggcctgcagcactgggctgaccccctgcctgagcacctctgtgttcaatcagacaagagatttctgtatccaggtgcagctcattcccagaatctactactatcctgaggaggtgctgctgcaagcctatgacaacagtcatcccaggactaagagggaagcagtgagtctcaccctggctgttctgctgggcctgggaatcacagctgggattggtacaggctcaacagcccttatcaagggccccattgacctgcagcaaggactgacttcccttcagattgcaattgatgctgatctgagagccctgcaggattctgtgtccaaactggaggacagccttacctctctctcagaagtggttcttcagaacaggagaggactggacttgctctttctcaaagagggagggctttgtgctgccctcaaggaggagtgttgcttttacattgatcattctggggctgttagagattcaatgaaaaagctcaaggagaaattggataaaaggcagctggaaagacagaagtctcaaaactggtatgaagggtggttcaacaatagtccttggttcactaccttgctgagcactattgctggcccactcttgctgctgttgctcctgctcatcctggggccctgtatcatcaacaagctggtgcagtttatcaatgacaggatcagtgcctgctgaggatccgcccctctccctcccccccccctaacgttactggccgaagccgcttggaataaggccggtgtgcgtttgtctatatgttattttccaccatattgccgtcttttggcaatgtgagggcccggaaacctggccctgtcttcttgacgagcattcctaggggtctttcccctctcgccaaaggaatgcaaggtctgttgaatgtcgtgaaggaagcagttcctctggaagcttcttgaagacaaacaacgtctgtagcgaccctttgcaggcagcggaaccccccacctggcgacaggtgcctctgcggccaaaagccacgtgtataagatacacctgcaaaggcggcacaaccccagtgccacgttgtgagttggatagttgtggaaagagtcaaatggctctcctcaagcgtattcaacaaggggctgaaggatgcccagaaggtaccccattgtatgggatctgatctggggcctcggtgcacatgctttacatgtgtttagtcgaggttaaaaaaacgtctaggccccccgaaccacggggacgtggttttcctttgaaaaacacgatgataatatggccacaaccatggacaaagtgctgaatagggaggaaagtctgcaactgatggatctgttgggacttgagaggtctgcatggggtaatatcccacttatgaggaaagcatacctgaagaagtgtaaagagttccatcctgacaaaggtggagatgaagagaagatgaaaaagatgaacacactgtataagaaaatggaagatggtgtaaagtatgctcaccagccagattttggaggtttttgggatgccacagagatacctacttatggtacagatgagtgggaacagtggtggaatgcatttaatgaagagaatttgttttgctctgaggaaatgcctagttctgatgatgaggccacagctgactcccagcacagtactccacccaagaaaaagagaaaagtggaagacccaaaggatttcccctctgaactcttgtccttcttgtctcatgcagtgttctcaaataggaccctggcttgctttgctatctacactactaaggagaaggcagctctcttgtacaagaaaatcatggaaaagtattctgtcacctttatttccaggcacaactcctataatcataatattctctttttcttgacaccccataggcatagggtgagtgcaattaacaactatgctcagaagttgtgtactttctccttcctgatctgtaagggtgtgaataaggagtatctcatgtattcagccctgaccagagacccctttagtgtgattgaagaatccctgcctggtgggctcaaggagcatgatttcaacccagaagaggctgaagaaacaaaacaggtgagctggaagcttgtgactgaatatgcaatggagacaaagtgtgatgatgtcctgctcctcctgggaatgtacctggaatttcagtatagctttgaaatgtgtctgaaatgtatcaaaaaggaacagccttctcattataagtatcatgaaaagcactatgccaatgcagctatatttgcagattctaaaaaccagaaaaccatttgtcagcaagctgttgacacagttctggccaagaaaagagtagactctctccagcttaccagggagcagatgttgacaaataggttcaatgaccttctggacagaatggacataatgtttggctcaactggatctgcagatatagaggagtggatggctggagtggcctggctgcactgtctcctccctaaaatggacagtgtagtctatgacttccttaagtgtatggtctataatatccctaaaaagagatactggttgttcaagggacccattgattcagggaaaactacccttgctgctgcacttctggaactctgtggtgggaaagctctcaatgtcaacctgccacttgatagactcaactttgagctgggggtggcaattgatcagtttttggtagtgtttgaagatgtgaaaggtacaggaggagagtccagggatttgcctagtggccaaggcatcaacaatctggacaacctcagagactacctggatgggtctgtaaaggtcaaccttgaaaaaaagcatctcaacaagaggactcaaatatttccacctggaatagtcactatgaatgaatattcagtgcccaagaccctccaggctagatttgtcaagcaaattgatttcagacctaaagattatctgaaacattgtttggagaggagtgagttcctccttgagaaaaggattattcagtcaggaatagcactgcttcttatgctgatatggtatagaccagtggctgagtttgcccaaagcattcagagtagaatagttgagtggaaagaaaggcttgacaaggagttttctctttcagtatatcaaaagatgaagttcaatgtggctatgggtattggagtgcttgattggttgagaaacagtgatgatgatgatgaagattctcaggaaaatgctgataaaaatgaggatgggggagagaagaatatggaagattctggtcatgaaactggcattgatagtcagagccaggggagtttccaggctccacagagctcccaaagtgtccatgaccacaaccagccttaccatatatgcagaggttttacttgtttcaagaaacctcccactccccctccagaacctgaaacatgagcggccgcgtggccagacatgataagatacattgatgagtttggacaaaccacaactagaatgcagtgaaaaaaatgctttatttgtgaaatttgtgatgctattgctttatttgtaaccattataagctgcaataaacaagttaacaacaacaattgcattcattttatgtttcaggttcagggggaggtgtgggaggttttttaaagcaagtaaaacctctacaaatgtggtatgggcactataagggcatgcaagtcagtcccgcccctaactcccatatgttaattaaatgacatatctacctaatttgtgtataataaccctgataaatgcttcaataatattgaaaaaggaagagtcctgtataaaaagaaccagctgtggaatgtgtgtcagttagtaggcttatgcaaagtagcccgcccaagagacaggctgaggcccgcccaccatgatagaacaagatggacttcatgctggatctcctgcagcatgggtggaaagactttttggttatgattgggctcagcagaccattggatgttctgatgctgctgtgttcaggcttagtgcacagggtaggccagtgctctttgtgaagactgatctctctggagctttgaatgaactgcaggatgaggctgctaggctttcatggctggccaccacaggtgtcccttgtgctgcagtgttggatgtggttactgaggctgggagggattggctcctcctgggagaagtgccaggtcaggatctgttgagttctcacctggctccagctgaaaaagtctccataatggcagatgctatgagaaggctgcacacattggacccagctacatgcccatttgaccatcaggccaaacacaggattgagagggccagaacaagaatggaggctgggttggtggaccaggatgaccttgatgaggagcatcagggcctggctccagctgaattgtttgccaggctcaaggctagtatgcctgatggggaggatctggtggtaactcatggtgatgcctgtttgcctaacatcatggtggaaaatggaaggttctctggattcattgattgtggaagactgggtgtagctgacaggtatcaggacatagctcttgcaacaagggatattgcagaggagttgggtggagaatgggctgacaggttcctggtcttgtatggcattgctgccccagacagccaaagaattgctttctataggctgttggatgagtttttctaagctcagcacccacaaagctctcaggtcctaagagacactggcacccatatccatgcatcccttgtataaataaagcatccagcaaagctggtaccatgtaaaactgtcttggttgtttccaaggtatagagcatagctcaataggtttttgactttgtcccgcccctctaagtcctgcacacagatactccaatatgacatacagcatgcttgggaactgagtgcccccatgtgggcagagagcaccatgtgccacagtccctgagaagttcttgggaagggtgggcaattgccatgtgtgcctagagaaggttgtttgtaatactgccaagtgccatgtggtgtgatattggctccatgtgccttgtttgtaataacatttccatgtgtcttgggaagaaccatatataagcagagctggtttagtgaaccctcagataggcctagaccatggccagcagtgagaatgtcataacagagttcatgagattcaaggtgaggatggagggaactgtcaatggtcatgagtttgagattgaaggggaaggggagggcagaccctatgagggccacaacacagtcaaattgaaggtgaccaaagggggaccccttccctttgcctgggacatcctgagcccacagtttcagtatggttccaaagtttatgtaaagcaccctgctgacatccctgactacaagaaactgtccttcccagaaggattcaagtgggaaagggtcatgaactttgaggatggaggggttgcaacagtgacccaggacagttctctccaagatggctgtttcatctacaaggtaaaattcattggtgtgaactttccctctgatggcccagtgatgcaaaaaaagaccatgggctgggaagcctcaacagaaaggctgtaccctagagatggagttctcaagggtgagacccacaaagctctaaagctcaaagatgggggccactatctggtggagttcaagagcatctacatggcaaaaaagccagtgcagttgcctggctattactatgtggatgccaagcttgacataacctcacacaatgaagactacactattgtggaacagtatgagaggactgagggaagacatcatctgtttctgtgaattcgcactgcatggacttacctgcctggtggtatcagtcacaggctctgataaggattcagctgttgtataaataaagcatgcagcctagcaggaaccatgttaatctctcttggttgtttccttggaatactcctaagcacattaggtttttagatctgtagaaaagatcaaaggatcttcttgagatcctttttttctgcgcgtaatctgctgcttgcaaacaaaaaaaccaccgctaccagcggtggtttgtttgccggatcaagagctaccaactctttttccgaaggtaactggcttcagcagagcgcagataccaaatactgtccttctagtgtagccgtagttaggccaccacttcaagaactctgtagcaccgcctacatacctcgctctgctaatcctgttaccagtggctgctgccagtggcgataagtcgtgtcttaccgggttggactcaagacgatagttaccggataaggcgcagcggtcgggctgaacggggggttcgtgcacacagcccagcttggagcgaacgacctacaccgaactgagatacctacagcgtgagctatgagaaagcgccacgcttcccgaagggagaaaggcggacaggtatccggtaagcggcagggtcggaacaggagagcgcacgagggagcttccagggggaaacgcctggtatctttatagtcctgtcgggtttcgccacctctgacttgagcgtcgatttttgtgatgctcgtcaggggggcggagcctatggaaaaacgccagcaacgcggcctttttacgg

SEQ ID NO: 724 - DNA, 7923 bp, Artificial Sequence
  pC-bCD-I-T-BB4 (pC-CDase-I-T-BB4)
ttcctattaatagtaatcaattacggggtcattagttcatagcccatatatggagttccgcgttacataacttacggtaaatggcccgcctggctgaccgcccaacgacccccgcccattgacgtcaataatgacgtatgttcccatagtaacgccaatagggactttccattgacgtcaatgggtggagtatttacggtaaactgcccacttggcagtacatcaagtgtatcatatgccaagtacgccccctattgacgtcaatgacggtaaatggcccgcctggcattatgcccagtacatgaccttatgggactttcctacttggcagtacatctacgtattagtcatcgctattaccatggtgatgcggttttggcagtacatcaatgggcgtggatagcggtttgactcacggggatttccaagtctccaccccattgacgtcaatgggagtttgttttggcaccaaaatcaacgggactttccaaaatgtcgtaacaactccgccccattgacgcaaatgggcggtaggcgtgtacggtgggaggtctatataagcagagctggtttagtgaaccgtcagatccgctagctagaccatgtcaaacaatgcactgcagactattatcaatgctaggctgcctggaaaagaagggctgtggcagattcacctgcaggatgggaaaatcagtgccattgatgcccagtctggagtgatgcctgtcacagaaaattccctggatgcagagcagggactggtgctgccaccttttgtggaaccccacatccatctggataccacacagacagctggccagcctaactggaatcagtctggaactctgtttgagggcattgaaagatgggctgagaggaaggctctgctgacccatgatgatgtgaagcagagggcctggcagacactgaaatggcagattgctaatggcattcagcatgtgagaacccatgtggatgtcagtgatgcaacactgactgctctgaaggcaatgctggaggtgaaacaggaagtggccccctggattgatctgcagattgctgctttccctcaggaaggcatcctgtcttatccaaatggagaggctctgctggaggaggcactgagactgggagcagatgtggttggagctattcctcactttgagtttactagagaatatggagtggagtcactgcataagacctttgccctggctcagaaatatgacagactgattgatgtgcactgtgatgaaattgatgatgagcagagcaggtttgtggaaacagtggcagccctggcccatagagagggaatgggagcaagagtgactgcctctcacactactgctatgcatagttacaatggggcatatacctcaagactgttcaggctgctgaagatgagtggaatcaactttgtggctaaccccctggtgaacattcacctgcagggcaggtttgatacttatccaaagaggagagggatcaccagagtgaaagagatgctggaatctggcatcaatgtgtgctttgggcatgatgatgtctgtggaccatggtatcccctgggcacagccaacatgctgcaggtgctgcacatgggcctgcatgtgtgtcagctgatggggtatggacagatcaatgatgggctgaacctgattacccaccattctgctaggacactgaatctgcaggactatggcattgctgcagggaacagtgcaaatctgatcattctgccagcagagaatggatttgatgcactgaggagacaggtgcctgtcaggtacagtgtgagaggagggaaagtcattgcctccacacagccagctcagaccacagtctacctggaacagcctgaagccattgattacaagaggggatccgcccctctccctcccccccccctaacgttactggccgaagccgcttggaataaggccggtgtgcgtttgtctatatgttattttccaccatattgccgtcttttggcaatgtgagggcccggaaacctggccctgtcttcttgacgagcattcctaggggtctttcccctctcgccaaaggaatgcaaggtctgttgaatgtcgtgaaggaagcagttcctctggaagcttcttgaagacaaacaacgtctgtagcgaccctttgcaggcagcggaaccccccacctggcgacaggtgcctctgcggccaaaagccacgtgtataagatacacctgcaaaggcggcacaaccccagtgccacgttgtgagttggatagttgtggaaagagtcaaatggctctcctcaagcgtattcaacaaggggctgaaggatgcccagaaggtaccccattgtatgggatctgatctggggcctcggtgcacatgctttacatgtgtttagtcgaggttaaaaaaacgtctaggccccccgaaccacggggacgtggttttcctttgaaaaacacgatgataatatggccacaaccatggacaaagtgctgaatagggaggaaagtctgcaactgatggatctgttgggacttgagaggtctgcatggggtaatatcccacttatgaggaaagcatacctgaagaagtgtaaagagttccatcctgacaaaggtggagatgaagagaagatgaaaaagatgaacacactgtataagaaaatggaagatggtgtaaagtatgctcaccagccagattttggaggtttttgggatgccacagagatacctacttatggtacagatgagtgggaacagtggtggaatgcatttaatgaagagaatttgttttgctctgaggaaatgcctagttctgatgatgaggccacagctgactcccagcacagtactccacccaagaaaaagagaaaagtggaagacccaaaggatttcccctctgaactcttgtccttcttgtctcatgcagtgttctcaaataggaccctggcttgctttgctatctacactactaaggagaaggcagctctcttgtacaagaaaatcatggaaaagtattctgtcacctttatttccaggcacaactcctataatcataatattctctttttcttgacaccccataggcatagggtgagtgcaattaacaactatgctcagaagttgtgtactttctccttcctgatctgtaagggtgtgaataaggagtatctcatgtattcagccctgaccagagacccctttagtgtgattgaagaatccctgcctggtgggctcaaggagcatgatttcaacccagaagaggctgaagaaacaaaacaggtgagctggaagcttgtgactgaatatgcaatggagacaaagtgtgatgatgtcctgctcctcctgggaatgtacctggaatttcagtatagctttgaaatgtgtctgaaatgtatcaaaaaggaacagccttctcattataagtatcatgaaaagcactatgccaatgcagctatatttgcagattctaaaaaccagaaaaccatttgtcagcaagctgttgacacagttctggccaagaaaagagtagactctctccagcttaccagggagcagatgttgacaaataggttcaatgaccttctggacagaatggacataatgtttggctcaactggatctgcagatatagaggagtggatggctggagtggcctggctgcactgtctcctccctaaaatggacagtgtagtctatgacttccttaagtgtatggtctataatatccctaaaaagagatactggttgttcaagggacccattgattcagggaaaactacccttgctgctgcacttctggaactctgtggtgggaaagctctcaatgtcaacctgccacttgatagactcaactttgagctgggggtggcaattgatcagtttttggtagtgtttgaagatgtgaaaggtacaggaggagagtccagggatttgcctagtggccaaggcatcaacaatctggacaacctcagagactacctggatgggtctgtaaaggtcaaccttgaaaaaaagcatctcaacaagaggactcaaatatttccacctggaatagtcactatgaatgaatattcagtgcccaagaccctccaggctagatttgtcaagcaaattgatttcagacctaaagattatctgaaacattgtttggagaggagtgagttcctccttgagaaaaggattattcagtcaggaatagcactgcttcttatgctgatatggtatagaccagtggctgagtttgcccaaagcattcagagtagaatagttgagtggaaagaaaggcttgacaaggagttttctctttcagtatatcaaaagatgaagttcaatgtggctatgggtattggagtgcttgattggttgagaaacagtgatgatgatgatgaagattctcaggaaaatgctgataaaaatgaggatgggggagagaagaatatggaagattctggtcatgaaactggcattgatagtcagagccaggggagtttccaggctccacagagctcccaaagtgtccatgaccacaaccagccttaccatatatgcagaggttttacttgtttcaagaaacctcccactccccctccagaacctgaaacatgagcggccgcgtggccagacatgataagatacattgatgagtttggacaaaccacaactagaatgcagtgaaaaaaatgctttatttgtgaaatttgtgatgctattgctttatttgtaaccattataagctgcaataaacaagttaacaacaacaattgcattcattttatgtttcaggttcagggggaggtgtgggaggttttttaaagcaagtaaaacctctacaaatgtggtatgggcactataagggcatgcaagtcagtcccgcccctaactccacctggttgcccatcccgcccctaactccgcccagttccgcccattctccgccccatggctgactaattttttttatttatgcagaggccgaggccgcctcggcctctgagctattccagaagtagtgaggaggcttttttggaggcccttaattaaatgacatatctacctaatttgtgtataataaccctgataaatgcttcaataatattgaaaaaggaagagtcctgtataaaaagaaccagctgtggaatgtgtgtcagttagtaggcttatgcaaagtagcccgcccaagagacaggctgaggcccgcccaccatgatagaacaagatggacttcatgctggatctcctgcagcatgggtggaaagactttttggttatgattgggctcagcagaccattggatgttctgatgctgctgtgttcaggcttagtgcacagggtaggccagtgctctttgtgaagactgatctctctggagctttgaatgaactgcaggatgaggctgctaggctttcatggctggccaccacaggtgtcccttgtgctgcagtgttggatgtggttactgaggctgggagggattggctcctcctgggagaagtgccaggtcaggatctgttgagttctcacctggctccagctgaaaaagtctccataatggcagatgctatgagaaggctgcacacattggacccagctacatgcccatttgaccatcaggccaaacacaggattgagagggccagaacaagaatggaggctgggttggtggaccaggatgaccttgatgaggagcatcagggcctggctccagctgaattgtttgccaggctcaaggctagtatgcctgatggggaggatctggtggtaactcatggtgatgcctgtttgcctaacatcatggtggaaaatggaaggttctctggattcattgattgtggaagactgggtgtagctgacaggtatcaggacatagctcttgcaacaagggatattgcagaggagttgggtggagaatgggctgacaggttcctggtcttgtatggcattgctgccccagacagccaaagaattgctttctataggctgttggatgagtttttctaagctcagcacccacaaagctctcaggtcctaagagacactggcacccatatccatgcatcccttgtataaataaagcatccagcaaagctggtaccatgtaaaactgtcttggttgtttccaaggtatagagcatagctcaataggtttttgactttgtcccgcccctctaagtcctgcacacagatactccaatatgacatacagcatgcttgggaactgagtgcccccatgtgggcagagagcaccatgtgccacagtccctgagaagttcttgggaagggtgggcaattgccatgtgtgcctagagaaggttgtttgtaatactgccaagtgccatgtggtgtgatattggctccatgtgccttgtttgtaataacatttccatgtgtcttgggaagaaccatatataagcagagctggtttagtgaaccctcagataggcctagaccatggccagcagtgagaatgtcataacagagttcatgagattcaaggtgaggatggagggaactgtcaatggtcatgagtttgagattgaaggggaaggggagggcagaccctatgagggccacaacacagtcaaattgaaggtgaccaaagggggaccccttccctttgcctgggacatcctgagcccacagtttcagtatggttccaaagtttatgtaaagcaccctgctgacatccctgactacaagaaactgtccttcccagaaggattcaagtgggaaagggtcatgaactttgaggatggaggggttgcaacagtgacccaggacagttctctccaagatggctgtttcatctacaaggtaaaattcattggtgtgaactttccctctgatggcccagtgatgcaaaaaaagaccatgggctgggaagcctcaacagaaaggctgtaccctagagatggagttctcaagggtgagacccacaaagctctaaagctcaaagatgggggccactatctggtggagttcaagagcatctacatggcaaaaaagccagtgcagttgcctggctattactatgtggatgccaagcttgacataacctcacacaatgaagactacactattgtggaacagtatgagaggactgagggaagacatcatctgtttctgtgaattcgcactgcatggacttacctgcctggtggtatcagtcacaggctctgataaggattcagctgttgtataaataaagcatgcagcctagcaggaaccatgttaatctctcttggttgtttccttggaatactcctaagcacattaggtttttagatctgtagaaaagatcaaaggatcttcttgagatcctttttttctgcgcgtaatctgctgcttgcaaacaaaaaaaccaccgctaccagcggtggtttgtttgccggatcaagagctaccaactctttttccgaaggtaactggcttcagcagagcgcagataccaaatactgtccttctagtgtagccgtagttaggccaccacttcaagaactctgtagcaccgcctacatacctcgctctgctaatcctgttaccagtggctgctgccagtggcgataagtcgtgtcttaccgggttggactcaagacgatagttaccggataaggcgcagcggtcgggctgaacggggggttcgtgcacacagcccagcttggagcgaacgacctacaccgaactgagatacctacagcgtgagctatgagaaagcgccacgcttcccgaagggagaaaggcggacaggtatccggtaagcggcagggtcggaacaggagagcgcacgagggagcttccagggggaaacgcctggtatctttatagtcctgtcgggtttcgccacctctgacttgagcgtcgatttttgtgatgctcgtcaggggggcggagcctatggaaaaacgccagcaacgcggcctttttacgg

SEQ ID NO: 725 - DNA, 7780 bp, Artificial Sequence
  pC-bCD-I-T-dSV4 (pC-CDase-I-T-dSV4)
ttcctattaatagtaatcaattacggggtcattagttcatagcccatatatggagttccgcgttacataacttacggtaaatggcccgcctggctgaccgcccaacgacccccgcccattgacgtcaataatgacgtatgttcccatagtaacgccaatagggactttccattgacgtcaatgggtggagtatttacggtaaactgcccacttggcagtacatcaagtgtatcatatgccaagtacgccccctattgacgtcaatgacggtaaatggcccgcctggcattatgcccagtacatgaccttatgggactttcctacttggcagtacatctacgtattagtcatcgctattaccatggtgatgcggttttggcagtacatcaatgggcgtggatagcggtttgactcacggggatttccaagtctccaccccattgacgtcaatgggagtttgttttggcaccaaaatcaacgggactttccaaaatgtcgtaacaactccgccccattgacgcaaatgggcggtaggcgtgtacggtgggaggtctatataagcagagctggtttagtgaaccgtcagatccgctagctagaccatgtcaaacaatgcactgcagactattatcaatgctaggctgcctggaaaagaagggctgtggcagattcacctgcaggatgggaaaatcagtgccattgatgcccagtctggagtgatgcctgtcacagaaaattccctggatgcagagcagggactggtgctgccaccttttgtggaaccccacatccatctggataccacacagacagctggccagcctaactggaatcagtctggaactctgtttgagggcattgaaagatgggctgagaggaaggctctgctgacccatgatgatgtgaagcagagggcctggcagacactgaaatggcagattgctaatggcattcagcatgtgagaacccatgtggatgtcagtgatgcaacactgactgctctgaaggcaatgctggaggtgaaacaggaagtggccccctggattgatctgcagattgctgctttccctcaggaaggcatcctgtcttatccaaatggagaggctctgctggaggaggcactgagactgggagcagatgtggttggagctattcctcactttgagtttactagagaatatggagtggagtcactgcataagacctttgccctggctcagaaatatgacagactgattgatgtgcactgtgatgaaattgatgatgagcagagcaggtttgtggaaacagtggcagccctggcccatagagagggaatgggagcaagagtgactgcctctcacactactgctatgcatagttacaatggggcatatacctcaagactgttcaggctgctgaagatgagtggaatcaactttgtggctaaccccctggtgaacattcacctgcagggcaggtttgatacttatccaaagaggagagggatcaccagagtgaaagagatgctggaatctggcatcaatgtgtgctttgggcatgatgatgtctgtggaccatggtatcccctgggcacagccaacatgctgcaggtgctgcacatgggcctgcatgtgtgtcagctgatggggtatggacagatcaatgatgggctgaacctgattacccaccattctgctaggacactgaatctgcaggactatggcattgctgcagggaacagtgcaaatctgatcattctgccagcagagaatggatttgatgcactgaggagacaggtgcctgtcaggtacagtgtgagaggagggaaagtcattgcctccacacagccagctcagaccacagtctacctggaacagcctgaagccattgattacaagaggggatccgcccctctccctcccccccccctaacgttactggccgaagccgcttggaataaggccggtgtgcgtttgtctatatgttattttccaccatattgccgtcttttggcaatgtgagggcccggaaacctggccctgtcttcttgacgagcattcctaggggtctttcccctctcgccaaaggaatgcaaggtctgttgaatgtcgtgaaggaagcagttcctctggaagcttcttgaagacaaacaacgtctgtagcgaccctttgcaggcagcggaaccccccacctggcgacaggtgcctctgcggccaaaagccacgtgtataagatacacctgcaaaggcggcacaaccccagtgccacgttgtgagttggatagttgtggaaagagtcaaatggctctcctcaagcgtattcaacaaggggctgaaggatgcccagaaggtaccccattgtatgggatctgatctggggcctcggtgcacatgctttacatgtgtttagtcgaggttaaaaaaacgtctaggccccccgaaccacggggacgtggttttcctttgaaaaacacgatgataatatggccacaaccatggacaaagtgctgaatagggaggaaagtctgcaactgatggatctgttgggacttgagaggtctgcatggggtaatatcccacttatgaggaaagcatacctgaagaagtgtaaagagttccatcctgacaaaggtggagatgaagagaagatgaaaaagatgaacacactgtataagaaaatggaagatggtgtaaagtatgctcaccagccagattttggaggtttttgggatgccacagagatacctacttatggtacagatgagtgggaacagtggtggaatgcatttaatgaagagaatttgttttgctctgaggaaatgcctagttctgatgatgaggccacagctgactcccagcacagtactccacccaagaaaaagagaaaagtggaagacccaaaggatttcccctctgaactcttgtccttcttgtctcatgcagtgttctcaaataggaccctggcttgctttgctatctacactactaaggagaaggcagctctcttgtacaagaaaatcatggaaaagtattctgtcacctttatttccaggcacaactcctataatcataatattctctttttcttgacaccccataggcatagggtgagtgcaattaacaactatgctcagaagttgtgtactttctccttcctgatctgtaagggtgtgaataaggagtatctcatgtattcagccctgaccagagacccctttagtgtgattgaagaatccctgcctggtgggctcaaggagcatgatttcaacccagaagaggctgaagaaacaaaacaggtgagctggaagcttgtgactgaatatgcaatggagacaaagtgtgatgatgtcctgctcctcctgggaatgtacctggaatttcagtatagctttgaaatgtgtctgaaatgtatcaaaaaggaacagccttctcattataagtatcatgaaaagcactatgccaatgcagctatatttgcagattctaaaaaccagaaaaccatttgtcagcaagctgttgacacagttctggccaagaaaagagtagactctctccagcttaccagggagcagatgttgacaaataggttcaatgaccttctggacagaatggacataatgtttggctcaactggatctgcagatatagaggagtggatggctggagtggcctggctgcactgtctcctccctaaaatggacagtgtagtctatgacttccttaagtgtatggtctataatatccctaaaaagagatactggttgttcaagggacccattgattcagggaaaactacccttgctgctgcacttctggaactctgtggtgggaaagctctcaatgtcaacctgccacttgatagactcaactttgagctgggggtggcaattgatcagtttttggtagtgtttgaagatgtgaaaggtacaggaggagagtccagggatttgcctagtggccaaggcatcaacaatctggacaacctcagagactacctggatgggtctgtaaaggtcaaccttgaaaaaaagcatctcaacaagaggactcaaatatttccacctggaatagtcactatgaatgaatattcagtgcccaagaccctccaggctagatttgtcaagcaaattgatttcagacctaaagattatctgaaacattgtttggagaggagtgagttcctccttgagaaaaggattattcagtcaggaatagcactgcttcttatgctgatatggtatagaccagtggctgagtttgcccaaagcattcagagtagaatagttgagtggaaagaaaggcttgacaaggagttttctctttcagtatatcaaaagatgaagttcaatgtggctatgggtattggagtgcttgattggttgagaaacagtgatgatgatgatgaagattctcaggaaaatgctgataaaaatgaggatgggggagagaagaatatggaagattctggtcatgaaactggcattgatagtcagagccaggggagtttccaggctccacagagctcccaaagtgtccatgaccacaaccagccttaccatatatgcagaggttttacttgtttcaagaaacctcccactccccctccagaacctgaaacatgagcggccgcgtggccagacatgataagatacattgatgagtttggacaaaccacaactagaatgcagtgaaaaaaatgctttatttgtgaaatttgtgatgctattgctttatttgtaaccattataagctgcaataaacaagttaacaacaacaattgcattcattttatgtttcaggttcagggggaggtgtgggaggttttttaaagcaagtaaaacctctacaaatgtggtatgggcactataagggcatgcaagtcagtcccgcccctaactcccatatgttaattaaatgacatatctacctaatttgtgtataataaccctgataaatgcttcaataatattgaaaaaggaagagtcctgtataaaaagaaccagctgtggaatgtgtgtcagttagtaggcttatgcaaagtagcccgcccaagagacaggctgaggcccgcccaccatgatagaacaagatggacttcatgctggatctcctgcagcatgggtggaaagactttttggttatgattgggctcagcagaccattggatgttctgatgctgctgtgttcaggcttagtgcacagggtaggccagtgctctttgtgaagactgatctctctggagctttgaatgaactgcaggatgaggctgctaggctttcatggctggccaccacaggtgtcccttgtgctgcagtgttggatgtggttactgaggctgggagggattggctcctcctgggagaagtgccaggtcaggatctgttgagttctcacctggctccagctgaaaaagtctccataatggcagatgctatgagaaggctgcacacattggacccagctacatgcccatttgaccatcaggccaaacacaggattgagagggccagaacaagaatggaggctgggttggtggaccaggatgaccttgatgaggagcatcagggcctggctccagctgaattgtttgccaggctcaaggctagtatgcctgatggggaggatctggtggtaactcatggtgatgcctgtttgcctaacatcatggtggaaaatggaaggttctctggattcattgattgtggaagactgggtgtagctgacaggtatcaggacatagctcttgcaacaagggatattgcagaggagttgggtggagaatgggctgacaggttcctggtcttgtatggcattgctgccccagacagccaaagaattgctttctataggctgttggatgagtttttctaagctcagcacccacaaagctctcaggtcctaagagacactggcacccatatccatgcatcccttgtataaataaagcatccagcaaagctggtaccatgtaaaactgtcttggttgtttccaaggtatagagcatagctcaataggtttttgactttgtcccgcccctctaagtcctgcacacagatactccaatatgacatacagcatgcttgggaactgagtgcccccatgtgggcagagagcaccatgtgccacagtccctgagaagttcttgggaagggtgggcaattgccatgtgtgcctagagaaggttgtttgtaatactgccaagtgccatgtggtgtgatattggctccatgtgccttgtttgtaataacatttccatgtgtcttgggaagaaccatatataagcagagctggtttagtgaaccctcagataggcctagaccatggccagcagtgagaatgtcataacagagttcatgagattcaaggtgaggatggagggaactgtcaatggtcatgagtttgagattgaaggggaaggggagggcagaccctatgagggccacaacacagtcaaattgaaggtgaccaaagggggaccccttccctttgcctgggacatcctgagcccacagtttcagtatggttccaaagtttatgtaaagcaccctgctgacatccctgactacaagaaactgtccttcccagaaggattcaagtgggaaagggtcatgaactttgaggatggaggggttgcaacagtgacccaggacagttctctccaagatggctgtttcatctacaaggtaaaattcattggtgtgaactttccctctgatggcccagtgatgcaaaaaaagaccatgggctgggaagcctcaacagaaaggctgtaccctagagatggagttctcaagggtgagacccacaaagctctaaagctcaaagatgggggccactatctggtggagttcaagagcatctacatggcaaaaaagccagtgcagttgcctggctattactatgtggatgccaagcttgacataacctcacacaatgaagactacactattgtggaacagtatgagaggactgagggaagacatcatctgtttctgtgaattcgcactgcatggacttacctgcctggtggtatcagtcacaggctctgataaggattcagctgttgtataaataaagcatgcagcctagcaggaaccatgttaatctctcttggttgtttccttggaatactcctaagcacattaggtttttagatctgtagaaaagatcaaaggatcttcttgagatcctttttttctgcgcgtaatctgctgcttgcaaacaaaaaaaccaccgctaccagcggtggtttgtttgccggatcaagagctaccaactctttttccgaaggtaactggcttcagcagagcgcagataccaaatactgtccttctagtgtagccgtagttaggccaccacttcaagaactctgtagcaccgcctacatacctcgctctgctaatcctgttaccagtggctgctgccagtggcgataagtcgtgtcttaccgggttggactcaagacgatagttaccggataaggcgcagcggtcgggctgaacggggggttcgtgcacacagcccagcttggagcgaacgacctacaccgaactgagatacctacagcgtgagctatgagaaagcgccacgcttcccgaagggagaaaggcggacaggtatccggtaagcggcagggtcggaacaggagagcgcacgagggagcttccagggggaaacgcctggtatctttatagtcctgtcgggtttcgccacctctgacttgagcgtcgatttttgtgatgctcgtcaggggggcggagcctatggaaaaacgccagcaacgcggcctttttacgg

SEQ ID NO: 726 - DNA, 7342 bp, Artificial Sequence
  pCzGFP-I-T-BB5
ttcctattaatagtaatcaattacggggtcattagttcatagcccatatatggagttccgcgttacataacttacggtaaatggcccgcctggctgaccgcccaacgacccccgcccattgacgtcaataatgacgtatgttcccatagtaacgccaatagggactttccattgacgtcaatgggtggagtatttacggtaaactgcccacttggcagtacatcaagtgtatcatatgccaagtacgccccctattgacgtcaatgacggtaaatggcccgcctggcattatgcccagtacatgaccttatgggactttcctacttggcagtacatctacgtattagtcatcgctattaccatggtgatgcggttttggcagtacatcaatgggcgtggatagcggtttgactcacggggatttccaagtctccaccccattgacgtcaatgggagtttgttttggcaccaaaatcaacgggactttccaaaatgtcgtaacaactccgccccattgacgcaaatgggcggtaggcgtgtacggtgggaggtctatataagcagagctggtttagtgaaccgtcagatccgctagctagaccatggtgagcaagggagaggaactctttacaggtgtggtcccaattctggtggagctggatggagatgtgaatgggcacaaattttctgtcagtggagagggagagggggatgctacctatggcaaactgactctgaagttcatctgcactactggcaagctgcctgtgccatggccaactctggtgacaaccctcacctatggagtccagtgcttttccagatatcctgaccacatgaaacagcatgactttttcaaatctgcaatgcctgagggctatgtgcaagagagaactatctttttcaaggatgatgggaactataagactagggctgaggtgaaatttgaaggagacaccctggtcaataggattgagctcaaggggattgacttcaaggaggatggcaacattctgggccataagctggagtataattacaattcccacaatgtctacattatggctgacaagcagaagaatggcattaaggtcaacttcaagattagacacaacatagaggatggatctgtgcagctggctgaccattaccagcagaatacacctattggggatgggccagtgctgctccctgacaatcactatctgagcacccaatctgctttgtctaaagatcctaatgaaaagagagatcacatggtgctgctggagtttgtaactgctgcaggaattaccttgggtatggatgaactctataagtaaggatccgcccctctccctcccccccccctaacgttactggccgaagccgcttggaataaggccggtgtgcgtttgtctatatgttattttccaccatattgccgtcttttggcaatgtgagggcccggaaacctggccctgtcttcttgacgagcattcctaggggtctttcccctctcgccaaaggaatgcaaggtctgttgaatgtcgtgaaggaagcagttcctctggaagcttcttgaagacaaacaacgtctgtagcgaccctttgcaggcagcggaaccccccacctggcgacaggtgcctctgcggccaaaagccacgtgtataagatacacctgcaaaggcggcacaaccccagtgccacgttgtgagttggatagttgtggaaagagtcaaatggctctcctcaagcgtattcaacaaggggctgaaggatgcccagaaggtaccccattgtatgggatctgatctggggcctcggtgcacatgctttacatgtgtttagtcgaggttaaaaaaacgtctaggccccccgaaccacggggacgtggttttcctttgaaaaacacgatgataatatggccacaaccatggacaaagtgctgaatagggaggaaagtctgcaactgatggatctgttgggacttgagaggtctgcatggggtaatatcccacttatgaggaaagcatacctgaagaagtgtaaagagttccatcctgacaaaggtggagatgaagagaagatgaaaaagatgaacacactgtataagaaaatggaagatggtgtaaagtatgctcaccagccagattttggaggtttttgggatgccacagagatacctacttatggtacagatgagtgggaacagtggtggaatgcatttaatgaagagaatttgttttgctctgaggaaatgcctagttctgatgatgaggccacagctgactcccagcacagtactccacccaagaaaaagagaaaagtggaagacccaaaggatttcccctctgaactcttgtccttcttgtctcatgcagtgttctcaaataggaccctggcttgctttgctatctacactactaaggagaaggcagctctcttgtacaagaaaatcatggaaaagtattctgtcacctttatttccaggcacaactcctataatcataatattctctttttcttgacaccccataggcatagggtgagtgcaattaacaactatgctcagaagttgtgtactttctccttcctgatctgtaagggtgtgaataaggagtatctcatgtattcagccctgaccagagacccctttagtgtgattgaagaatccctgcctggtgggctcaaggagcatgatttcaacccagaagaggctgaagaaacaaaacaggtgagctggaagcttgtgactgaatatgcaatggagacaaagtgtgatgatgtcctgctcctcctgggaatgtacctggaatttcagtatagctttgaaatgtgtctgaaatgtatcaaaaaggaacagccttctcattataagtatcatgaaaagcactatgccaatgcagctatatttgcagattctaaaaaccagaaaaccatttgtcagcaagctgttgacacagttctggccaagaaaagagtagactctctccagcttaccagggagcagatgttgacaaataggttcaatgaccttctggacagaatggacataatgtttggctcaactggatctgcagatatagaggagtggatggctggagtggcctggctgcactgtctcctccctaaaatggacagtgtagtctatgacttccttaagtgtatggtctataatatccctaaaaagagatactggttgttcaagggacccattgattcagggaaaactacccttgctgctgcacttctggaactctgtggtgggaaagctctcaatgtcaacctgccacttgatagactcaactttgagctgggggtggcaattgatcagtttttggtagtgtttgaagatgtgaaaggtacaggaggagagtccagggatttgcctagtggccaaggcatcaacaatctggacaacctcagagactacctggatgggtctgtaaaggtcaaccttgaaaaaaagcatctcaacaagaggactcaaatatttccacctggaatagtcactatgaatgaatattcagtgcccaagaccctccaggctagatttgtcaagcaaattgatttcagacctaaagattatctgaaacattgtttggagaggagtgagttcctccttgagaaaaggattattcagtcaggaatagcactgcttcttatgctgatatggtatagaccagtggctgagtttgcccaaagcattcagagtagaatagttgagtggaaagaaaggcttgacaaggagttttctctttcagtatatcaaaagatgaagttcaatgtggctatgggtattggagtgcttgattggttgagaaacagtgatgatgatgatgaagattctcaggaaaatgctgataaaaatgaggatgggggagagaagaatatggaagattctggtcatgaaactggcattgatagtcagagccaggggagtttccaggctccacagagctcccaaagtgtccatgaccacaaccagccttaccatatatgcagaggttttacttgtttcaagaaacctcccactccccctccagaacctgaaacatgagcggccgcgactctagatcataatcagccataccacacctccccctgaacctgaaaaatcaatgcaattattgttgaaataaagcacccagcaatgcctgggaccatgtaaaactgtcctggttctttccaaggtatagagcatagcccacaggctgatatttctggccagggttggttggaggacagccttgtctataggaagagaatgaggtttttgcactataagggcatgcaagtcagtcccgcccctaactccacctggttgcccatcccgcccctaactccgcccagttccgcccattctccgccccatggctgactaattttttttatttatgcagaggccgaggccgcctcggcctctgagctattccagaagtagtgaggaggcttttttggaggcccttaattaaatgacatatctacctaatttgtgtataataaccctgataaatgcttcaataatattgaaaaaggaagagtcctgtataaaaagaaccagctgtggaatgtgtgtcagttagtaggcttatgcaaagtagcccgcccaagagacaggctgaggcccgcccaccatgatagaacaagatggacttcatgctggatctcctgcagcatgggtggaaagactttttggttatgattgggctcagcagaccattggatgttctgatgctgctgtgttcaggcttagtgcacagggtaggccagtgctctttgtgaagactgatctctctggagctttgaatgaactgcaggatgaggctgctaggctttcatggctggccaccacaggtgtcccttgtgctgcagtgttggatgtggttactgaggctgggagggattggctcctcctgggagaagtgccaggtcaggatctgttgagttctcacctggctccagctgaaaaagtctccataatggcagatgctatgagaaggctgcacacattggacccagctacatgcccatttgaccatcaggccaaacacaggattgagagggccagaacaagaatggaggctgggttggtggaccaggatgaccttgatgaggagcatcagggcctggctccagctgaattgtttgccaggctcaaggctagtatgcctgatggggaggatctggtggtaactcatggtgatgcctgtttgcctaacatcatggtggaaaatggaaggttctctggattcattgattgtggaagactgggtgtagctgacaggtatcaggacatagctcttgcaacaagggatattgcagaggagttgggtggagaatgggctgacaggttcctggtcttgtatggcattgctgccccagacagccaaagaattgctttctataggctgttggatgagtttttctaagctcagcacccacaaagctctcaggtcctaagagacactggcacccatatccatgcatcccttgtataaataaagcatccagcaaagctggtaccatgtaaaactgtcttggttgtttccaaggtatagagcatagctcaataggtttttgactttgtcccgcccctctaagtcctgcacacagatactccaatatgacatacagcatgcttgggaactgagtgcccccatgtgggcagagagcaccatgtgccacagtccctgagaagttcttgggaagggtgggcaattgccatgtgtgcctagagaaggttgtttgtaatactgccaagtgccatgtggtgtgatattggctccatgtgccttgtttgtaataacatttccatgtgtcttgggaagaaccatatataagcagagctggtttagtgaaccctcagataggcctagaccatggccagcagtgagaatgtcataacagagttcatgagattcaaggtgaggatggagggaactgtcaatggtcatgagtttgagattgaaggggaaggggagggcagaccctatgagggccacaacacagtcaaattgaaggtgaccaaagggggaccccttccctttgcctgggacatcctgagcccacagtttcagtatggttccaaagtttatgtaaagcaccctgctgacatccctgactacaagaaactgtccttcccagaaggattcaagtgggaaagggtcatgaactttgaggatggaggggttgcaacagtgacccaggacagttctctccaagatggctgtttcatctacaaggtaaaattcattggtgtgaactttccctctgatggcccagtgatgcaaaaaaagaccatgggctgggaagcctcaacagaaaggctgtaccctagagatggagttctcaagggtgagacccacaaagctctaaagctcaaagatgggggccactatctggtggagttcaagagcatctacatggcaaaaaagccagtgcagttgcctggctattactatgtggatgccaagcttgacataacctcacacaatgaagactacactattgtggaacagtatgagaggactgagggaagacatcatctgtttctgtgaattcgcactgcatggacttacctgcctggtggtatcagtcacaggctctgataaggattcagctgttgtataaataaagcatgcagcctagcaggaaccatgttaatctctcttggttgtttccttggaatactcctaagcacattaggtttttagatctgtagaaaagatcaaaggatcttcttgagatcctttttttctgcgcgtaatctgctgcttgcaaacaaaaaaaccaccgctaccagcggtggtttgtttgccggatcaagagctaccaactctttttccgaaggtaactggcttcagcagagcgcagataccaaatactgtccttctagtgtagccgtagttaggccaccacttcaagaactctgtagcaccgcctacatacctcgctctgctaatcctgttaccagtggctgctgccagtggcgataagtcgtgtcttaccgggttggactcaagacgatagttaccggataaggcgcagcggtcgggctgaacggggggttcgtgcacacagcccagcttggagcgaacgacctacaccgaactgagatacctacagcgtgagctatgagaaagcgccacgcttcccgaagggagaaaggcggacaggtatccggtaagcggcagggtcggaacaggagagcgcacgagggagcttccagggggaaacgcctggtatctttatagtcctgtcgggtttcgccacctctgacttgagcgtcgatttttgtgatgctcgtcaggggggcggagcctatggaaaaacgccagcaacgcggcctttttacgg

SEQ ID NO: 727 - DNA, 8892 bp, Artificial Sequence
  pC-T-I-RSV-GALV-BB3
ttcctattaatagtaatcaattacggggtcattagttcatagcccatatatggagttccgcgttacataacttacggtaaatggcccgcctggctgaccgcccaacgacccccgcccattgacgtcaataatgacgtatgttcccatagtaacgccaatagggactttccattgacgtcaatgggtggagtatttacggtaaactgcccacttggcagtacatcaagtgtatcatatgccaagtacgccccctattgacgtcaatgacggtaaatggcccgcctggcattatgcccagtacatgaccttatgggactttcctacttggcagtacatctacgtattagtcatcgctattaccatggtgatgcggttttggcagtacatcaatgggcgtggatagcggtttgactcacggggatttccaagtctccaccccattgacgtcaatgggagtttgttttggcaccaaaatcaacgggactttccaaaatgtcgtaacaactccgccccattgacgcaaatgggcggtaggcgtgtacggtgggaggtctatataagcagagctggtttagtgaaccgtcagatccgctagcacaaccatggacaaagtgctgaatagggaggaaagtctgcaactgatggatctgttgggacttgagaggtctgcatggggtaatatcccacttatgaggaaagcatacctgaagaagtgtaaagagttccatcctgacaaaggtggagatgaagagaagatgaaaaagatgaacacactgtataagaaaatggaagatggtgtaaagtatgctcaccagccagattttggaggtttttgggatgccacagagatacctacttatggtacagatgagtgggaacagtggtggaatgcatttaatgaagagaatttgttttgctctgaggaaatgcctagttctgatgatgaggccacagctgactcccagcacagtactccacccaagaaaaagagaaaagtggaagacccaaaggatttcccctctgaactcttgtccttcttgtctcatgcagtgttctcaaataggaccctggcttgctttgctatctacactactaaggagaaggcagctctcttgtacaagaaaatcatggaaaagtattctgtcacctttatttccaggcacaactcctataatcataatattctctttttcttgacaccccataggcatagggtgagtgcaattaacaactatgctcagaagttgtgtactttctccttcctgatctgtaagggtgtgaataaggagtatctcatgtattcagccctgaccagagacccctttagtgtgattgaagaatccctgcctggtgggctcaaggagcatgatttcaacccagaagaggctgaagaaacaaaacaggtgagctggaagcttgtgactgaatatgcaatggagacaaagtgtgatgatgtcctgctcctcctgggaatgtacctggaatttcagtatagctttgaaatgtgtctgaaatgtatcaaaaaggaacagccttctcattataagtatcatgaaaagcactatgccaatgcagctatatttgcagattctaaaaaccagaaaaccatttgtcagcaagctgttgacacagttctggccaagaaaagagtagactctctccagcttaccagggagcagatgttgacaaataggttcaatgaccttctggacagaatggacataatgtttggctcaactggatctgcagatatagaggagtggatggctggagtggcctggctgcactgtctcctccctaaaatggacagtgtagtctatgacttccttaagtgtatggtctataatatccctaaaaagagatactggttgttcaagggacccattgattcagggaaaactacccttgctgctgcacttctggaactctgtggtgggaaagctctcaatgtcaacctgccacttgatagactcaactttgagctgggggtggcaattgatcagtttttggtagtgtttgaagatgtgaaaggtacaggaggagagtccagggatttgcctagtggccaaggcatcaacaatctggacaacctcagagactacctggatgggtctgtaaaggtcaaccttgaaaaaaagcatctcaacaagaggactcaaatatttccacctggaatagtcactatgaatgaatattcagtgcccaagaccctccaggctagatttgtcaagcaaattgatttcagacctaaagattatctgaaacattgtttggagaggagtgagttcctccttgagaaaaggattattcagtcaggaatagcactgcttcttatgctgatatggtatagaccagtggctgagtttgcccaaagcattcagagtagaatagttgagtggaaagaaaggcttgacaaggagttttctctttcagtatatcaaaagatgaagttcaatgtggctatgggtattggagtgcttgattggttgagaaacagtgatgatgatgatgaagattctcaggaaaatgctgataaaaatgaggatgggggagagaagaatatggaagattctggtcatgaaactggcattgatagtcagagccaggggagtttccaggctccacagagctcccaaagtgtccatgaccacaaccagccttaccatatatgcagaggttttacttgtttcaagaaacctcccactccccctccagaacctgaaacatgaggatccgacactagatcataatcagccataccacatttgtagaggttttacttgctttaaaaaacctcccacacctccccctgaacctgaaacataaaatgaatgcacattgttgttgttaacttgtttattgcagcttataatggttacaaataaagcaatagcatcacaaatttcacaaataaagcatttttttcactgcattctagttgtggtttgtccaaactcatcaatgtatcttaaggcgtggcgcctcccgatcccctatggtggactctcagtacaatctgctctgatgccgcatagttaagccagtatctgctccctgcttgtgtgttggaggtcgctgagtagtgcgcgagcaaaatttaagctacaacaaggcaaggcttgaccgacacattgcatgaagaatctgcttagggttaggcgttttgcgctgcttcgcgatgtacgggccagatatacgcgtatctgaggggactagggtgtgtttaggcgaaaagcggggcttcggttgtacgcggttaggagtcccctcaggatatagtagtttcgcttttgcatagggagggggaaatgtagtcttatgcaatacacttgtagtcttgcaacatggtaacgatgagttagcaacatgccttacaaggagagaaaaagcaccgtgcatgccgattggtggaagtaaggtggtacgatcgtgcctatataaaggaaggcaacagacaggtctgacatggattggacgaaccactgatatccgcattgcagagataattgtatataaaagtgcctagctcgatacaataaacgccatttgaccattcaccacattggtgtgcacctcctggccacaaccatggtcctgctgccaggctcaatgctgctgaccagcaatctccaccacctgagacaccagatgtcacctgggtcctggaagagacttatcattcttctgtcctgtgtgtttgggggtggaggcaccagcctgcaaaataagaacccacatcagcccatgaccctcacctggcaggtcctgagccagacaggtgatgttgtctgggataccaaagcagtccagcccccctggacttggtggcccaccttgaaacctgatgtctgtgccctggcagctagtctggagagctgggacatcccaggcactgatgtcagcagcagcaagagggttaggccacctgacagtgactacactgcagcctacaagcagatcacctggggagccattggctgctcctaccctagagctagaaccagaatggcctccagtaccttctatgtctgccctagagatggcagaactctgtctgaggccaggagatgtggtggactggaatccctctactgcaaagagtgggactgtgagactactggcacaggctattggttgtccaagtcatccaaggacttgatcactgtgaagtgggatcagaattcagagtggacccagaaatttcagcaatgccaccagacaggctggtgcaaccccttgaagattgactttacagataaggggaagctcagtaaagactggatcacaggcaaaacctggggactgaggttctatgtttctggccatccaggtgttcagttcaccatcagattgaaaatcaccaatatgccagctgtggcagtgggtcctgaccttgtgctggtggaacagggcccacccaggacatccttggccttgcctccacccctccctcccagggaagccccccctccaagcttgcctgactccaattctacagctctggctactagtgcccaaactcctactgtgaggaagaccattgtcacactcaatacaccccctccaactacaggagacaggttgtttgaccttgtgcaaggtgccttccttacacttaatgccaccaaccctggagccacagaaagttgttggctgtgcctggcaatgggtccaccctactatgaggcaattgcaagttctggtgaagtggcatatagcactgacctggatagatgtaggtgggggacccagggaaaactcacacttactgaagtgagtgggcatggcctgtgcattggaaaagtcccattcacacaccaacatctgtgcaaccaaacactctccatcaactcttctggtgaccaccagtacctgcttccaagcaaccacagctggtgggcctgcagcactgggctgaccccctgcctgagcacctctgtgttcaatcagacaagagatttctgtatccaggtgcagctcattcccagaatctactactatcctgaggaggtgctgctgcaagcctatgacaacagtcatcccaggactaagagggaagcagtgagtctcaccctggctgttctgctgggcctgggaatcacagctgggattggtacaggctcaacagcccttatcaagggccccattgacctgcagcaaggactgacttcccttcagattgcaattgatgctgatctgagagccctgcaggattctgtgtccaaactggaggacagccttacctctctctcagaagtggttcttcagaacaggagaggactggacttgctctttctcaaagagggagggctttgtgctgccctcaaggaggagtgttgcttttacattgatcattctggggctgttagagattcaatgaaaaagctcaaggagaaattggataaaaggcagctggaaagacagaagtctcaaaactggtatgaagggtggttcaacaatagtccttggttcactaccttgctgagcactattgctggcccactcttgctgctgttgctcctgctcatcctggggccctgtatcatcaacaagctggtgcagtttatcaatgacaggatcagtgcctgctgagcggccgcgactctagatcataatcagccataccacacctccccctgaacctgaaaaatcaatgcaattattgttgaaataaagcacccagcaatgcctgggaccatgtaaaactgtcctggttctttccaaggtatagagcatagcccacaggctgatatttctggccagggttggttggaggacagccttgtctataggaagagaatgaggtttttgcactataagggcatgcaagtcagtcccgcccctaactccacctggttgcccatcccgcccctaactccgcccagttccgcccattctccgccccatggctgactaattttttttatttatgcagaggcggaggccgcctcggcctctgagctattccagaagtagtgaggaggcttttttggaggcccttaattaaattgacatatctacctaatttgtgtataataaccctgataaatgcttcaataatattgaaaaaggaagagtcctgtataaaaagaaccagctgtggaatgtgtgtcagttagtaggcttatgcaaagtagcccgcccaagagacaggctgaggcccgcccaccatgatagaacaagatggacttcatgctggatctcctgcagcatgggtggaaagactttttggttatgattgggctcagcagaccattggatgttctgatgctgctgtgttcaggcttagtgcacagggtaggccagtgctctttgtgaagactgatctctctggagctttgaatgaactgcaggatgaggctgctaggctttcatggctggccaccacaggtgtcccttgtgctgcagtgttggatgtggttactgaggctgggagggattggctcctcctgggagaagtgccaggtcaggatctgttgagttctcacctggctccagctgaaaaagtctccataatggcagatgctatgagaaggctgcacacattggacccagctacatgcccatttgaccatcaggccaaacacaggattgagagggccagaacaagaatggaggctgggttggtggaccaggatgaccttgatgaggagcatcagggcctggctccagctgaattgtttgccaggctcaaggctagtatgcctgatggggaggatctggtggtaactcatggtgatgcctgtttgcctaacatcatggtggaaaatggaaggttctctggattcattgattgtggaagactgggtgtagctgacaggtatcaggacatagctcttgcaacaagggatattgcagaggagttgggtggagaatgggctgacaggttcctggtcttgtatggcattgctgccccagacagccaaagaattgctttctataggctgttggatgagtttttctaagctcagcacccacaaagctctcaggtcctaagagacactggcacccatatccatgcatcccttgtataaataaagcatccagcaaagctggtaccatgtaaaactgtcttggttgtttccaaggtatagagcatagctcaataggtttttgactttgtcccgcccctctaagtcctgcacacagatactccaatatgacatacagcatgcttgggaactgagtgcccccatgtgggcagagagcaccatgtgccacagtccctgagaagttcttgggaagggtgggcaattgccatgtgtgcctagagaaggttgtttgtaatactgccaagtgccatgtggtgtgatattggctccatgtgccttgtttgtaataacatttccatgtgtcttgggaagaaccatatataagcagagctggtttagtgaaccctcagataggcctagaccatggccagcagtgagaatgtcataacagagttcatgagattcaaggtgaggatggagggaactgtcaatggtcatgagtttgagattgaaggggaaggggagggcagaccctatgagggccacaacacagtcaaattgaaggtgaccaaagggggaccccttccctttgcctgggacatcctgagcccacagtttcagtatggttccaaagtttatgtaaagcaccctgctgacatccctgactacaagaaactgtccttcccagaaggattcaagtgggaaagggtcatgaactttgaggatggaggggttgcaacagtgacccaggacagttctctccaagatggctgtttcatctacaaggtaaaattcattggtgtgaactttccctctgatggcccagtgatgcaaaaaaagaccatgggctgggaagcctcaacagaaaggctgtaccctagagatggagttctcaagggtgagacccacaaagctctaaagctcaaagatgggggccactatctggtggagttcaagagcatctacatggcaaaaaagccagtgcagttgcctggctattactatgtggatgccaagcttgacataacctcacacaatgaagactacactattgtggaacagtatgagaggactgagggaagacatcatctgtttctgtgaattcgcactgcatggacttacctgcctggtggtatcagtcacaggctctgataaggattcagctgttgtataaataaagcatgcagcctagcaggaaccatgttaatctctcttggttgtttccttggaatactcctaagcacattaggtttttagatctgtagaaaagatcaaaggatcttcttgagatcctttttttctgcgcgtaatctgctgcttgcaaacaaaaaaaccaccgctaccagcggtggtttgtttgccggatcaagagctaccaactctttttccgaaggtaactggcttcagcagagcgcagataccaaatactgtccttctagtgtagccgtagttaggccaccacttcaagaactctgtagcaccgcctacatacctcgctctgctaatcctgttaccagtggctgctgccagtggcgataagtcgtgtcttaccgggttggactcaagacgatagttaccggataaggcgcagcggtcgggctgaacggggggttcgtgcacacagcccagcttggagcgaacgacctacaccgaactgagatacctacagcgtgagctatgagaaagcgccacgcttcccgaagggagaaaggcggacaggtatccggtaagcggcagggtcggaacaggagagcgcacgagggagcttccagggggaaacgcctggtatctttatagtcctgtcgggtttcgccacctctgacttgagcgtcgatttttgtgatgctcgtcaggggggcggagcctatggaaaaacgccagcaacgcggcctttttacgg

SEQ ID NO: 728 - DNA, 8542 bp, Artificial Sequence
  pC-Luc-RSV-I-T-BB3
ttcctattaatagtaatcaattacggggtcattagttcatagcccatatatggagttccgcgttacataacttacggtaaatggcccgcctggctgaccgcccaacgacccccgcccattgacgtcaataatgacgtatgttcccatagtaacgccaatagggactttccattgacgtcaatgggtggagtatttacggtaaactgcccacttggcagtacatcaagtgtatcatatgccaagtacgccccctattgacgtcaatgacggtaaatggcccgcctggcattatgcccagtacatgaccttatgggactttcctacttggcagtacatctacgtattagtcatcgctattaccatggtgatgcggttttggcagtacatcaatgggcgtggatagcggtttgactcacggggatttccaagtctccaccccattgacgtcaatgggagtttgttttggcaccaaaatcaacgggactttccaaaatgtcgtaacaactccgccccattgacgcaaatgggcggtaggcgtgtacggtgggaggtctatataagcagagctggtttagtgaaccgtcagatccgctagctggtaccatggaagacgccaaaaacataaagaaaggcccggcgccattctatcctctagaggatggaaccgctggagagcaactgcataaggctatgaagagatacgccctggttcctggaacaattgcttttacagatgcacatatcgaggtgaacatcacgtacgcggaatacttcgaaatgtccgttcggttggcagaagctatgaaacgatatgggctgaatacaaatcacagaatcgtcgtatgcagtgaaaactctcttcaattctttatgccggtgttgggcgcgttatttatcggagttgcagttgcgcccgcgaacgacatttataatgaacgtgaattgctcaacagtatgaacatttcgcagcctaccgtagtgtttgtttccaaaaaggggttgcaaaaaattttgaacgtgcaaaaaaaattaccaataatccagaaaattattatcatggattctaaaacggattaccagggatttcagtcgatgtacacgttcgtcacatctcatctacctcccggttttaatgaatacgattttgtaccagagtcctttgatcgtgacaaaacaattgcactgataatgaattcctctggatctactgggttacctaagggtgtggcccttccgcatagaactgcctgcgtcagattctcgcatgccagagatcctatttttggcaatcaaatcattccggatactgcgattttaagtgttgttccattccatcacggttttggaatgtttactacactcggatatttgatatgtggatttcgagtcgtcttaatgtatagatttgaagaagagctgtttttacgatcccttcaggattacaaaattcaaagtgcgttgctagtaccaaccctattttcattcttcgccaaaagcactctgattgacaaatacgatttatctaatttacacgaaattgcttctgggggcgcacctctttcgaaagaagtcggggaagcggttgcaaaacgcttccatcttccagggatacgacaaggatatgggctcactgagactacatcagctattctgattacacccgagggggatgataaaccgggcgcggtcggtaaagttgttccattttttgaagcgaaggttgtggatctggataccgggaaaacgctgggcgttaatcagagaggcgaattatgtgtcagaggacctatgattatgtccggttatgtaaacaatccggaagcgaccaacgccttgattgacaaggatggatggctacattctggagacatagcttactgggacgaagacgaacacttcttcatagttgaccgcttgaagtctttaattaaatacaaaggatatcaggtggcccccgctgaattggaatcgatattgttacaacaccccaacatcttcgacgcgggcgtggcaggtcttcccgacgatgacgccggtgaacttcccgccgccgttgttgttttggagcacggaaagacgatgacggaaaaagagatcgtggattacgtcgccagtcaagtaacaaccgcgaaaaagttgcgcggaggagttgtgtttgtggacgaagtaccgaaaggtcttaccggaaaactcgacgcaagaaaaatcagagagatcctcataaaggccaagaagggcggaaagtccaaattgtaaggatccgacactagatcataatcagccataccacatttgtagaggttttacttgctttaaaaaacctcccacacctccccctgaacctgaaacataaaatgaatgcacattgttgttgttaacttgtttattgcagcttataatggttacaaataaagcaatagcatcacaaatttcacaaataaagcatttttttcactgcattctagttgtggtttgtccaaactcatcaatgtatcttaaggcgtggcgcctcccgatcccctatggtggactctcagtacaatctgctctgatgccgcatagttaagccagtatctgctccctgcttgtgtgttggaggtcgctgagtagtgcgcgagcaaaatttaagctacaacaaggcaaggcttgaccgacacattgcatgaagaatctgcttagggttaggcgttttgcgctgcttcgcgatgtacgggccagatatacgcgtatctgaggggactagggtgtgtttaggcgaaaagcggggcttcggttgtacgcggttaggagtcccctcaggatatagtagtttcgcttttgcatagggagggggaaatgtagtcttatgcaatacacttgtagtcttgcaacatggtaacgatgagttagcaacatgccttacaaggagagaaaaagcaccgtgcatgccgattggtggaagtaaggtggtacgatcgtgcctatataaaggaaggcaacagacaggtctgacatggattggacgaaccactgatatccgcattgcagagataattgtatataaaagtgcctagctcgatacaataaacgccatttgaccattcaccacattggtgtgcacctcctggccacaaccatggacaaagtgctgaatagggaggaaagtctgcaactgatggatctgttgggacttgagaggtctgcatggggtaatatcccacttatgaggaaagcatacctgaagaagtgtaaagagttccatcctgacaaaggtggagatgaagagaagatgaaaaagatgaacacactgtataagaaaatggaagatggtgtaaagtatgctcaccagccagattttggaggtttttgggatgccacagagatacctacttatggtacagatgagtgggaacagtggtggaatgcatttaatgaagagaatttgttttgctctgaggaaatgcctagttctgatgatgaggccacagctgactcccagcacagtactccacccaagaaaaagagaaaagtggaagacccaaaggatttcccctctgaactcttgtccttcttgtctcatgcagtgttctcaaataggaccctggcttgctttgctatctacactactaaggagaaggcagctctcttgtacaagaaaatcatggaaaagtattctgtcacctttatttccaggcacaactcctataatcataatattctctttttcttgacaccccataggcatagggtgagtgcaattaacaactatgctcagaagttgtgtactttctccttcctgatctgtaagggtgtgaataaggagtatctcatgtattcagccctgaccagagacccctttagtgtgattgaagaatccctgcctggtgggctcaaggagcatgatttcaacccagaagaggctgaagaaacaaaacaggtgagctggaagcttgtgactgaatatgcaatggagacaaagtgtgatgatgtcctgctcctcctgggaatgtacctggaatttcagtatagctttgaaatgtgtctgaaatgtatcaaaaaggaacagccttctcattataagtatcatgaaaagcactatgccaatgcagctatatttgcagattctaaaaaccagaaaaccatttgtcagcaagctgttgacacagttctggccaagaaaagagtagactctctccagcttaccagggagcagatgttgacaaataggttcaatgaccttctggacagaatggacataatgtttggctcaactggatctgcagatatagaggagtggatggctggagtggcctggctgcactgtctcctccctaaaatggacagtgtagtctatgacttccttaagtgtatggtctataatatccctaaaaagagatactggttgttcaagggacccattgattcagggaaaactacccttgctgctgcacttctggaactctgtggtgggaaagctctcaatgtcaacctgccacttgatagactcaactttgagctgggggtggcaattgatcagtttttggtagtgtttgaagatgtgaaaggtacaggaggagagtccagggatttgcctagtggccaaggcatcaacaatctggacaacctcagagactacctggatgggtctgtaaaggtcaaccttgaaaaaaagcatctcaacaagaggactcaaatatttccacctggaatagtcactatgaatgaatattcagtgcccaagaccctccaggctagatttgtcaagcaaattgatttcagacctaaagattatctgaaacattgtttggagaggagtgagttcctccttgagaaaaggattattcagtcaggaatagcactgcttcttatgctgatatggtatagaccagtggctgagtttgcccaaagcattcagagtagaatagttgagtggaaagaaaggcttgacaaggagttttctctttcagtatatcaaaagatgaagttcaatgtggctatgggtattggagtgcttgattggttgagaaacagtgatgatgatgatgaagattctcaggaaaatgctgataaaaatgaggatgggggagagaagaatatggaagattctggtcatgaaactggcattgatagtcagagccaggggagtttccaggctccacagagctcccaaagtgtccatgaccacaaccagccttaccatatatgcagaggttttacttgtttcaagaaacctcccactccccctccagaacctgaaacatgagcggccgcgactctagatcataatcagccataccacacctccccctgaacctgaaaaatcaatgcaattattgttgaaataaagcacccagcaatgcctgggaccatgtaaaactgtcctggttctttccaaggtatagagcatagcccacaggctgatatttctggccagggttggttggaggacagccttgtctataggaagagaatgaggtttttgcactataagggcatgcaagtcagtcccgcccctaactccacctggttgcccatcccgcccctaactccgcccagttccgcccattctccgccccatggctgactaattttttttatttatgcagaggcggaggccgcctcggcctctgagctattccagaagtagtgaggaggcttttttggaggcccttaattaaattgacatatctacctaatttgtgtataataaccctgataaatgcttcaataatattgaaaaaggaagagtcctgtataaaaagaaccagctgtggaatgtgtgtcagttagtaggcttatgcaaagtagcccgcccaagagacaggctgaggcccgcccaccatgatagaacaagatggacttcatgctggatctcctgcagcatgggtggaaagactttttggttatgattgggctcagcagaccattggatgttctgatgctgctgtgttcaggcttagtgcacagggtaggccagtgctctttgtgaagactgatctctctggagctttgaatgaactgcaggatgaggctgctaggctttcatggctggccaccacaggtgtcccttgtgctgcagtgttggatgtggttactgaggctgggagggattggctcctcctgggagaagtgccaggtcaggatctgttgagttctcacctggctccagctgaaaaagtctccataatggcagatgctatgagaaggctgcacacattggacccagctacatgcccatttgaccatcaggccaaacacaggattgagagggccagaacaagaatggaggctgggttggtggaccaggatgaccttgatgaggagcatcagggcctggctccagctgaattgtttgccaggctcaaggctagtatgcctgatggggaggatctggtggtaactcatggtgatgcctgtttgcctaacatcatggtggaaaatggaaggttctctggattcattgattgtggaagactgggtgtagctgacaggtatcaggacatagctcttgcaacaagggatattgcagaggagttgggtggagaatgggctgacaggttcctggtcttgtatggcattgctgccccagacagccaaagaattgctttctataggctgttggatgagtttttctaagctcagcacccacaaagctctcaggtcctaagagacactggcacccatatccatgcatcccttgtataaataaagcatccagcaaagctggtaccatgtaaaactgtcttggttgtttccaaggtatagagcatagctcaataggtttttgactttgtcccgcccctctaagtcctgcacacagatactccaatatgacatacagcatgcttgggaactgagtgcccccatgtgggcagagagcaccatgtgccacagtccctgagaagttcttgggaagggtgggcaattgccatgtgtgcctagagaaggttgtttgtaatactgccaagtgccatgtggtgtgatattggctccatgtgccttgtttgtaataacatttccatgtgtcttgggaagaaccatatataagcagagctggtttagtgaaccctcagataggcctagaccatggccagcagtgagaatgtcataacagagttcatgagattcaaggtgaggatggagggaactgtcaatggtcatgagtttgagattgaaggggaaggggagggcagaccctatgagggccacaacacagtcaaattgaaggtgaccaaagggggaccccttccctttgcctgggacatcctgagcccacagtttcagtatggttccaaagtttatgtaaagcaccctgctgacatccctgactacaagaaactgtccttcccagaaggattcaagtgggaaagggtcatgaactttgaggatggaggggttgcaacagtgacccaggacagttctctccaagatggctgtttcatctacaaggtaaaattcattggtgtgaactttccctctgatggcccagtgatgcaaaaaaagaccatgggctgggaagcctcaacagaaaggctgtaccctagagatggagttctcaagggtgagacccacaaagctctaaagctcaaagatgggggccactatctggtggagttcaagagcatctacatggcaaaaaagccagtgcagttgcctggctattactatgtggatgccaagcttgacataacctcacacaatgaagactacactattgtggaacagtatgagaggactgagggaagacatcatctgtttctgtgaattcgcactgcatggacttacctgcctggtggtatcagtcacaggctctgataaggattcagctgttgtataaataaagcatgcagcctagcaggaaccatgttaatctctcttggttgtttccttggaatactcctaagcacattaggtttttagatctgtagaaaagatcaaaggatcttcttgagatcctttttttctgcgcgtaatctgctgcttgcaaacaaaaaaaccaccgctaccagcggtggtttgtttgccggatcaagagctaccaactctttttccgaaggtaactggcttcagcagagcgcagataccaaatactgtccttctagtgtagccgtagttaggccaccacttcaagaactctgtagcaccgcctacatacctcgctctgctaatcctgttaccagtggctgctgccagtggcgataagtcgtgtcttaccgggttggactcaagacgatagttaccggataaggcgcagcggtcgggctgaacggggggttcgtgcacacagcccagcttggagcgaacgacctacaccgaactgagatacctacagcgtgagctatgagaaagcgccacgcttcccgaagggagaaaggcggacaggtatccggtaagcggcagggtcggaacaggagagcgcacgagggagcttccagggggaaacgcctggtatctttatagtcctgtcgggtttcgccacctctgacttgagcgtcgatttttgtgatgctcgtcaggggggcggagcctatggaaaaacgccagcaacgcggcctttttacgg

SEQ ID NO: 729 - DNA, 7333 bp, Artificial Sequence
  pCzGFP-1I-T-BB3
ttcctattaatagtaatcaattacggggtcattagttcatagcccatatatggagttccgcgttacataacttacggtaaatggcccgcctggctgaccgcccaacgacccccgcccattgacgtcaataatgacgtatgttcccatagtaacgccaatagggactttccattgacgtcaatgggtggagtatttacggtaaactgcccacttggcagtacatcaagtgtatcatatgccaagtacgccccctattgacgtcaatgacggtaaatggcccgcctggcattatgcccagtacatgaccttatgggactttcctacttggcagtacatctacgtattagtcatcgctattaccatggtgatgcggttttggcagtacatcaatgggcgtggatagcggtttgactcacggggatttccaagtctccaccccattgacgtcaatgggagtttgttttggcaccaaaatcaacgggactttccaaaatgtcgtaacaactccgccccattgacgcaaatgggcggtaggcgtgtacggtgggaggtctatataagcagagctggtttagtgaaccgtcagatccgctagctagaccatggtgagcaagggagaggaactctttacaggtgtggtcccaattctggtggagctggatggagatgtgaatgggcacaaattttctgtcagtggagagggagagggggatgctacctatggcaaactgactctgaagttcatctgcactactggcaagctgcctgtgccatggccaactctggtgacaaccctcacctatggagtccagtgcttttccagatatcctgaccacatgaaacagcatgactttttcaaatctgcaatgcctgagggctatgtgcaagagagaactatctttttcaaggatgatgggaactataagactagggctgaggtgaaatttgaaggagacaccctggtcaataggattgagctcaaggggattgacttcaaggaggatggcaacattctgggccataagctggagtataattacaattcccacaatgtctacattatggctgacaagcagaagaatggcattaaggtcaacttcaagattagacacaacatagaggatggatctgtgcagctggctgaccattaccagcagaatacacctattggggatgggccagtgctgctccctgacaatcactatctgagcacccaatctgctttgtctaaagatcctaatgaaaagagagatcacatggtgctgctggagtttgtaactgctgcaggaattaccttgggtatggatgaactctataagtaaggatccgcccctctccctcccccccccctaacgttactggccgaagccgcttggaataaggccggtgtgcgtttgtctatatgttattttccaccatattgccgtcttttggcaatgtgagggcccggaaacctggccctgtcttcttgacgagcattcctaggggtctttcccctctcgccaaaggaatgcaaggtctgttgaatgtcgtgaaggaagcagttcctctggaagcttcttgaagacaaacaacgtctgtagcgaccctttgcaggcagcggaaccccccacctggcgacaggtgcctctgcggccaaaagccacgtgtataagatacacctgcaaaggcggcacaaccccagtgccacgttgtgagttggatagttgtggaaagagtcaaatggctctcctcaagcgtattcaacaaggggctgaaggatgcccagaaggtaccccattgtatgggatctgatctggggcctcggtgcacatgctttacatgtgtttagtcgaggttaaaaaaacgtctaggccccccgaaccacggggacgtggttttcctttgaaaaacacgatccacaaccatggacaaagtgctgaatagggaggaaagtctgcaactgatggatctgttgggacttgagaggtctgcatggggtaatatcccacttatgaggaaagcatacctgaagaagtgtaaagagttccatcctgacaaaggtggagatgaagagaagatgaaaaagatgaacacactgtataagaaaatggaagatggtgtaaagtatgctcaccagccagattttggaggtttttgggatgccacagagatacctacttatggtacagatgagtgggaacagtggtggaatgcatttaatgaagagaatttgttttgctctgaggaaatgcctagttctgatgatgaggccacagctgactcccagcacagtactccacccaagaaaaagagaaaagtggaagacccaaaggatttcccctctgaactcttgtccttcttgtctcatgcagtgttctcaaataggaccctggcttgctttgctatctacactactaaggagaaggcagctctcttgtacaagaaaatcatggaaaagtattctgtcacctttatttccaggcacaactcctataatcataatattctctttttcttgacaccccataggcatagggtgagtgcaattaacaactatgctcagaagttgtgtactttctccttcctgatctgtaagggtgtgaataaggagtatctcatgtattcagccctgaccagagacccctttagtgtgattgaagaatccctgcctggtgggctcaaggagcatgatttcaacccagaagaggctgaagaaacaaaacaggtgagctggaagcttgtgactgaatatgcaatggagacaaagtgtgatgatgtcctgctcctcctgggaatgtacctggaatttcagtatagctttgaaatgtgtctgaaatgtatcaaaaaggaacagccttctcattataagtatcatgaaaagcactatgccaatgcagctatatttgcagattctaaaaaccagaaaaccatttgtcagcaagctgttgacacagttctggccaagaaaagagtagactctctccagcttaccagggagcagatgttgacaaataggttcaatgaccttctggacagaatggacataatgtttggctcaactggatctgcagatatagaggagtggatggctggagtggcctggctgcactgtctcctccctaaaatggacagtgtagtctatgacttccttaagtgtatggtctataatatccctaaaaagagatactggttgttcaagggacccattgattcagggaaaactacccttgctgctgcacttctggaactctgtggtgggaaagctctcaatgtcaacctgccacttgatagactcaactttgagctgggggtggcaattgatcagtttttggtagtgtttgaagatgtgaaaggtacaggaggagagtccagggatttgcctagtggccaaggcatcaacaatctggacaacctcagagactacctggatgggtctgtaaaggtcaaccttgaaaaaaagcatctcaacaagaggactcaaatatttccacctggaatagtcactatgaatgaatattcagtgcccaagaccctccaggctagatttgtcaagcaaattgatttcagacctaaagattatctgaaacattgtttggagaggagtgagttcctccttgagaaaaggattattcagtcaggaatagcactgcttcttatgctgatatggtatagaccagtggctgagtttgcccaaagcattcagagtagaatagttgagtggaaagaaaggcttgacaaggagttttctctttcagtatatcaaaagatgaagttcaatgtggctatgggtattggagtgcttgattggttgagaaacagtgatgatgatgatgaagattctcaggaaaatgctgataaaaatgaggatgggggagagaagaatatggaagattctggtcatgaaactggcattgatagtcagagccaggggagtttccaggctccacagagctcccaaagtgtccatgaccacaaccagccttaccatatatgcagaggttttacttgtttcaagaaacctcccactccccctccagaacctgaaacatgagcggccgcgactctagatcataatcagccataccacacctccccctgaacctgaaaaatcaatgcaattattgttgaaataaagcacccagcaatgcctgggaccatgtaaaactgtcctggttctttccaaggtatagagcatagcccacaggctgatatttctggccagggttggttggaggacagccttgtctataggaagagaatgaggtttttgcactataagggcatgcaagtcagtcccgcccctaactccacctggttgcccatcccgcccctaactccgcccagttccgcccattctccgccccatggctgactaattttttttatttatgcagaggcggaggccgcctcggcctctgagctattccagaagtagtgaggaggcttttttggaggcccttaattaaattgacatatctacctaatttgtgtataataaccctgataaatgcttcaataatattgaaaaaggaagagtcctgtataaaaagaaccagctgtggaatgtgtgtcagttagtaggcttatgcaaagtagcccgcccaagagacaggctgaggcccgcccaccatgatagaacaagatggacttcatgctggatctcctgcagcatgggtggaaagactttttggttatgattgggctcagcagaccattggatgttctgatgctgctgtgttcaggcttagtgcacagggtaggccagtgctctttgtgaagactgatctctctggagctttgaatgaactgcaggatgaggctgctaggctttcatggctggccaccacaggtgtcccttgtgctgcagtgttggatgtggttactgaggctgggagggattggctcctcctgggagaagtgccaggtcaggatctgttgagttctcacctggctccagctgaaaaagtctccataatggcagatgctatgagaaggctgcacacattggacccagctacatgcccatttgaccatcaggccaaacacaggattgagagggccagaacaagaatggaggctgggttggtggaccaggatgaccttgatgaggagcatcagggcctggctccagctgaattgtttgccaggctcaaggctagtatgcctgatggggaggatctggtggtaactcatggtgatgcctgtttgcctaacatcatggtggaaaatggaaggttctctggattcattgattgtggaagactgggtgtagctgacaggtatcaggacatagctcttgcaacaagggatattgcagaggagttgggtggagaatgggctgacaggttcctggtcttgtatggcattgctgccccagacagccaaagaattgctttctataggctgttggatgagtttttctaagctcagcacccacaaagctctcaggtcctaagagacactggcacccatatccatgcatcccttgtataaataaagcatccagcaaagctggtaccatgtaaaactgtcttggttgtttccaaggtatagagcatagctcaataggtttttgactttgtcccgcccctctaagtcctgcacacagatactccaatatgacatacagcatgcttgggaactgagtgcccccatgtgggcagagagcaccatgtgccacagtccctgagaagttcttgggaagggtgggcaattgccatgtgtgcctagagaaggttgtttgtaatactgccaagtgccatgtggtgtgatattggctccatgtgccttgtttgtaataacatttccatgtgtcttgggaagaaccatatataagcagagctggtttagtgaaccctcagataggcctagaccatggccagcagtgagaatgtcataacagagttcatgagattcaaggtgaggatggagggaactgtcaatggtcatgagtttgagattgaaggggaaggggagggcagaccctatgagggccacaacacagtcaaattgaaggtgaccaaagggggaccccttccctttgcctgggacatcctgagcccacagtttcagtatggttccaaagtttatgtaaagcaccctgctgacatccctgactacaagaaactgtccttcccagaaggattcaagtgggaaagggtcatgaactttgaggatggaggggttgcaacagtgacccaggacagttctctccaagatggctgtttcatctacaaggtaaaattcattggtgtgaactttccctctgatggcccagtgatgcaaaaaaagaccatgggctgggaagcctcaacagaaaggctgtaccctagagatggagttctcaagggtgagacccacaaagctctaaagctcaaagatgggggccactatctggtggagttcaagagcatctacatggcaaaaaagccagtgcagttgcctggctattactatgtggatgccaagcttgacataacctcacacaatgaagactacactattgtggaacagtatgagaggactgagggaagacatcatctgtttctgtgaattcgcactgcatggacttacctgcctggtggtatcagtcacaggctctgataaggattcagctgttgtataaataaagcatgcagcctagcaggaaccatgttaatctctcttggttgtttccttggaatactcctaagcacattaggtttttagatctgtagaaaagatcaaaggatcttcttgagatcctttttttctgcgcgtaatctgctgcttgcaaacaaaaaaaccaccgctaccagcggtggtttgtttgccggatcaagagctaccaactctttttccgaaggtaactggcttcagcagagcgcagataccaaatactgtccttctagtgtagccgtagttaggccaccacttcaagaactctgtagcaccgcctacatacctcgctctgctaatcctgttaccagtggctgctgccagtggcgataagtcgtgtcttaccgggttggactcaagacgatagttaccggataaggcgcagcggtcgggctgaacggggggttcgtgcacacagcccagcttggagcgaacgacctacaccgaactgagatacctacagcgtgagctatgagaaagcgccacgcttcccgaagggagaaaggcggacaggtatccggtaagcggcagggtcggaacaggagagcgcacgagggagcttccagggggaaacgcctggtatctttatagtcctgtcgggtttcgccacctctgacttgagcgtcgatttttgtgatgctcgtcaggggggcggagcctatggaaaaacgccagcaacgcggcctttttacgg

SEQ ID NO: 730 - DNA, 7343 bp, Artificial Sequence
  pCMV-zGFP-IRES-LTAg(S677A/S679A)-BB3 (pC-zGFP-I-T(S677A/S679A)-BB3
ttcctattaatagtaatcaattacggggtcattagttcatagcccatatatggagttccgcgttacataacttacggtaaatggcccgcctggctgaccgcccaacgacccccgcccattgacgtcaataatgacgtatgttcccatagtaacgccaatagggactttccattgacgtcaatgggtggagtatttacggtaaactgcccacttggcagtacatcaagtgtatcatatgccaagtacgccccctattgacgtcaatgacggtaaatggcccgcctggcattatgcccagtacatgaccttatgggactttcctacttggcagtacatctacgtattagtcatcgctattaccatggtgatgcggttttggcagtacatcaatgggcgtggatagcggtttgactcacggggatttccaagtctccaccccattgacgtcaatgggagtttgttttggcaccaaaatcaacgggactttccaaaatgtcgtaacaactccgccccattgacgcaaatgggcggtaggcgtgtacggtgggaggtctatataagcagagctggtttagtgaaccgtcagatccgctagctagaccatggtgagcaagggagaggaactctttacaggtgtggtcccaattctggtggagctggatggagatgtgaatgggcacaaattttctgtcagtggagagggagagggggatgctacctatggcaaactgactctgaagttcatctgcactactggcaagctgcctgtgccatggccaactctggtgacaaccctcacctatggagtccagtgcttttccagatatcctgaccacatgaaacagcatgactttttcaaatctgcaatgcctgagggctatgtgcaagagagaactatctttttcaaggatgatgggaactataagactagggctgaggtgaaatttgaaggagacaccctggtcaataggattgagctcaaggggattgacttcaaggaggatggcaacattctgggccataagctggagtataattacaattcccacaatgtctacattatggctgacaagcagaagaatggcattaaggtcaacttcaagattagacacaacatagaggatggatctgtgcagctggctgaccattaccagcagaatacacctattggggatgggccagtgctgctccctgacaatcactatctgagcacccaatctgctttgtctaaagatcctaatgaaaagagagatcacatggtgctgctggagtttgtaactgctgcaggaattaccttgggtatggatgaactctataagtaaggatccgcccctctccctcccccccccctaacgttactggccgaagccgcttggaataaggccggtgtgcgtttgtctatatgttattttccaccatattgccgtcttttggcaatgtgagggcccggaaacctggccctgtcttcttgacgagcattcctaggggtctttcccctctcgccaaaggaatgcaaggtctgttgaatgtcgtgaaggaagcagttcctctggaagcttcttgaagacaaacaacgtctgtagcgaccctttgcaggcagcggaaccccccacctggcgacaggtgcctctgcggccaaaagccacgtgtataagatacacctgcaaaggcggcacaaccccagtgccacgttgtgagttggatagttgtggaaagagtcaaatggctctcctcaagcgtattcaacaaggggctgaaggatgcccagaaggtaccccattgtatgggatctgatctggggcctcggtgcacatgctttacatgtgtttagtcgaggttaaaaaaacgtctaggccccccgaaccacggggacgtggttttcctttgaaaaacacgatgataatatggccacaaccatggacaaagtgctgaatagggaggaaagtctgcaactgatggatctgttgggacttgagaggtctgcatggggtaatatcccacttatgaggaaagcatacctgaagaagtgtaaagagttccatcctgacaaaggtggagatgaagagaagatgaaaaagatgaacacactgtataagaaaatggaagatggtgtaaagtatgctcaccagccagattttggaggtttttgggatgccacagagatacctacttatggtacagatgagtgggaacagtggtggaatgcatttaatgaagagaatttgttttgctctgaggaaatgcctagttctgatgatgaggccacagctgactcccagcacagtactccacccaagaaaaagagaaaagtggaagacccaaaggatttcccctctgaactcttgtccttcttgtctcatgcagtgttctcaaataggaccctggcttgctttgctatctacactactaaggagaaggcagctctcttgtacaagaaaatcatggaaaagtattctgtcacctttatttccaggcacaactcctataatcataatattctctttttcttgacaccccataggcatagggtgagtgcaattaacaactatgctcagaagttgtgtactttctccttcctgatctgtaagggtgtgaataaggagtatctcatgtattcagccctgaccagagacccctttagtgtgattgaagaatccctgcctggtgggctcaaggagcatgatttcaacccagaagaggctgaagaaacaaaacaggtgagctggaagcttgtgactgaatatgcaatggagacaaagtgtgatgatgtcctgctcctcctgggaatgtacctggaatttcagtatagctttgaaatgtgtctgaaatgtatcaaaaaggaacagccttctcattataagtatcatgaaaagcactatgccaatgcagctatatttgcagattctaaaaaccagaaaaccatttgtcagcaagctgttgacacagttctggccaagaaaagagtagactctctccagcttaccagggagcagatgttgacaaataggttcaatgaccttctggacagaatggacataatgtttggctcaactggatctgcagatatagaggagtggatggctggagtggcctggctgcactgtctcctccctaaaatggacagtgtagtctatgacttccttaagtgtatggtctataatatccctaaaaagagatactggttgttcaagggacccattgattcagggaaaactacccttgctgctgcacttctggaactctgtggtgggaaagctctcaatgtcaacctgccacttgatagactcaactttgagctgggggtggcaattgatcagtttttggtagtgtttgaagatgtgaaaggtacaggaggagagtccagggatttgcctagtggccaaggcatcaacaatctggacaacctcagagactacctggatgggtctgtaaaggtcaaccttgaaaaaaagcatctcaacaagaggactcaaatatttccacctggaatagtcactatgaatgaatattcagtgcccaagaccctccaggctagatttgtcaagcaaattgatttcagacctaaagattatctgaaacattgtttggagaggagtgagttcctccttgagaaaaggattattcagtcaggaatagcactgcttcttatgctgatatggtatagaccagtggctgagtttgcccaaagcattcagagtagaatagttgagtggaaagaaaggcttgacaaggagttttctctttcagtatatcaaaagatgaagttcaatgtggctatgggtattggagtgcttgattggttgagaaacagtgatgatgatgatgaagattctcaggaaaatgctgataaaaatgaggatgggggagagaagaatatggaagattctggtcatgaaactggcattgatagtcagagccaggggagtttccaggctccacagagcgcccaagctgtccatgaccacaaccagccttaccatatatgcagaggttttacttgtttcaagaaacctcccactccccctccagaacctgaaacatgagcggccgcgactctagatcataatcagccataccacacctccccctgaacctgaaaaatcaatgcaattattgttgaaataaagcacccagcaatgcctgggaccatgtaaaactgtcctggttctttccaaggtatagagcatagcccacaggctgatatttctggccagggttggttggaggacagccttgtctataggaagagaatgaggtttttgcactataagggcatgcaagtcagtcccgcccctaactccacctggttgcccatcccgcccctaactccgcccagttccgcccattctccgccccatggctgactaattttttttatttatgcagaggcggaggccgcctcggcctctgagctattccagaagtagtgaggaggcttttttggaggcccttaattaaattgacatatctacctaatttgtgtataataaccctgataaatgcttcaataatattgaaaaaggaagagtcctgtataaaaagaaccagctgtggaatgtgtgtcagttagtaggcttatgcaaagtagcccgcccaagagacaggctgaggcccgcccaccatgatagaacaagatggacttcatgctggatctcctgcagcatgggtggaaagactttttggttatgattgggctcagcagaccattggatgttctgatgctgctgtgttcaggcttagtgcacagggtaggccagtgctctttgtgaagactgatctctctggagctttgaatgaactgcaggatgaggctgctaggctttcatggctggccaccacaggtgtcccttgtgctgcagtgttggatgtggttactgaggctgggagggattggctcctcctgggagaagtgccaggtcaggatctgttgagttctcacctggctccagctgaaaaagtctccataatggcagatgctatgagaaggctgcacacattggacccagctacatgcccatttgaccatcaggccaaacacaggattgagagggccagaacaagaatggaggctgggttggtggaccaggatgaccttgatgaggagcatcagggcctggctccagctgaattgtttgccaggctcaaggctagtatgcctgatggggaggatctggtggtaactcatggtgatgcctgtttgcctaacatcatggtggaaaatggaaggttctctggattcattgattgtggaagactgggtgtagctgacaggtatcaggacatagctcttgcaacaagggatattgcagaggagttgggtggagaatgggctgacaggttcctggtcttgtatggcattgctgccccagacagccaaagaattgctttctataggctgttggatgagtttttctaagctcagcacccacaaagctctcaggtcctaagagacactggcacccatatccatgcatcccttgtataaataaagcatccagcaaagctggtaccatgtaaaactgtcttggttgtttccaaggtatagagcatagctcaataggtttttgactttgtcccgcccctctaagtcctgcacacagatactccaatatgacatacagcatgcttgggaactgagtgcccccatgtgggcagagagcaccatgtgccacagtccctgagaagttcttgggaagggtgggcaattgccatgtgtgcctagagaaggttgtttgtaatactgccaagtgccatgtggtgtgatattggctccatgtgccttgtttgtaataacatttccatgtgtcttgggaagaaccatatataagcagagctggtttagtgaaccctcagataggcctagaccatggccagcagtgagaatgtcataacagagttcatgagattcaaggtgaggatggagggaactgtcaatggtcatgagtttgagattgaaggggaaggggagggcagaccctatgagggccacaacacagtcaaattgaaggtgaccaaagggggaccccttccctttgcctgggacatcctgagcccacagtttcagtatggttccaaagtttatgtaaagcaccctgctgacatccctgactacaagaaactgtccttcccagaaggattcaagtgggaaagggtcatgaactttgaggatggaggggttgcaacagtgacccaggacagttctctccaagatggctgtttcatctacaaggtaaaattcattggtgtgaactttccctctgatggcccagtgatgcaaaaaaagaccatgggctgggaagcctcaacagaaaggctgtaccctagagatggagttctcaagggtgagacccacaaagctctaaagctcaaagatgggggccactatctggtggagttcaagagcatctacatggcaaaaaagccagtgcagttgcctggctattactatgtggatgccaagcttgacataacctcacacaatgaagactacactattgtggaacagtatgagaggactgagggaagacatcatctgtttctgtgaattcgcactgcatggacttacctgcctggtggtatcagtcacaggctctgataaggattcagctgttgtataaataaagcatgcagcctagcaggaaccatgttaatctctcttggttgtttccttggaatactcctaagcacattaggtttttagatctgtagaaaagatcaaaggatcttcttgagatcctttttttctgcgcgtaatctgctgcttgcaaacaaaaaaaccaccgctaccagcggtggtttgtttgccggatcaagagctaccaactctttttccgaaggtaactggcttcagcagagcgcagataccaaatactgtccttctagtgtagccgtagttaggccaccacttcaagaactctgtagcaccgcctacatacctcgctctgctaatcctgttaccagtggctgctgccagtggcgataagtcgtgtcttaccgggttggactcaagacgatagttaccggataaggcgcagcggtcgggctgaacggggggttcgtgcacacagcccagcttggagcgaacgacctacaccgaactgagatacctacagcgtgagctatgagaaagcgccacgcttcccgaagggagaaaggcggacaggtatccggtaagcggcagggtcggaacaggagagcgcacgagggagcttccagggggaaacgcctggtatctttatagtcctgtcgggtttcgccacctctgacttgagcgtcgatttttgtgatgctcgtcaggggggcggagcctatggaaaaacgccagcaacgcggcctttttacgg

SEQ ID NO: 731 - DNA, 678 bp, Artificial Sequence
  CpG-free, human codon-optimized RFP (zRFP)
  CDS (1)...(675): zRFP
atggccagcagtgagaatgtcataacagagttcatgagattcaaggtgaggatggagggaactgtcaatggtcatgagtttgagattgaaggggaaggggagggcagaccctatgagggccacaacacagtcaaattgaaggtgaccaaagggggaccccttccctttgcctgggacatcctgagcccacagtttcagtatggttccaaagtttatgtaaagcaccctgctgacatccctgactacaagaaactgtccttcccagaaggattcaagtgggaaagggtcatgaactttgaggatggaggggttgcaacagtgacccaggacagttctctccaagatggctgtttcatctacaaggtaaaattcattggtgtgaactttccctctgatggcccagtgatgcaaaaaaagaccatgggctgggaagcctcaacagaaaggctgtaccctagagatggagttctcaagggtgagacccacaaagctctaaagctcaaagatgggggccactatctggtggagttcaagagcatctacatggcaaaaaagccagtgcagttgcctggctattactatgtggatgccaagcttgacataacctcacacaatgaagactacactattgtggaacagtatgagaggactgagggaagacatcatctgtttctgtga

SEQ ID NO: 732 - protein, 225 aa, Artificial Sequence
  zRFP protein sequence
MASSENVITEFMRFKVRMEGTVNGHEFEIEGEGEGRPYEGHNTVKLKVTKGGPLPFAWDILSPQFQYGSKVYVKHPADIPDYKKLSFPEGFKWERVMNFEDGGVATVTQDSSLQDGCFIYKVKFIGVNFPSDGPVMQKKTMGWEASTERLYPRDGVLKGETHKALKLKDGGHYLVEFKSIYMAKKPVQLPGYYYVDAKLDITSHNEDYTIVEQYERTEGRHHLFL

SEQ ID NO: 733 - DNA, 752 bp, Artificial Sequence
  CpG-free, human codon-optimized RFP (zRFP) with flanking StuI and EcoRI restriction sites
aggcctagaccatggccagcagtgagaatgtcataacagagttcatgagattcaaggtgaggatggagggaactgtcaatggtcatgagtttgagattgaaggggaaggggagggcagaccctatgagggccacaacacagtcaaattgaaggtgaccaaagggggaccccttccctttgcctgggacatcctgagcccacagtttcagtatggttccaaagtttatgtaaagcaccctgctgacatccctgactacaagaaactgtccttcccagaaggattcaagtgggaaagggtcatgaactttgaggatggaggggttgcaacagtgacccaggacagttctctccaagatggctgtttcatctacaaggtaaaattcattggtgtgaactttccctctgatggcccagtgatgcaaaaaaagaccatgggctgggaagcctcaacagaaaggctgtaccctagagatggagttctcaagggtgagacccacaaagctctaaagctcaaagatgggggccactatctggtggagttcaagagcatctacatggcaaaaaagccagtgcagttgcctggctattactatgtggatgccaagcttgacataacctcacacaatgaagactacactattgtggaacagtatgagaggactgagggaagacatcatctgtttctgtgaattcgcactgcatggacttacctgcctggtggtatcagtcacaggctctgataaggattcagc

SEQ ID NO: 734 - DNA, 1138 bp, Artificial Sequence
  zRFP with promoter and flanking PflFI and BglII restriction sites
  CDS (301)...(978): zRFP coding sequence
gactttgtcccgcccctctaagtcctgcacacagatactccaatatgacatacagcatgcttgggaactgagtgcccccatgtgggcagagagcaccatgtgccacagtccctgagaagttcttgggaagggtgggcaattgccatgtgtgcctagagaaggttgtttgtaatactgccaagtgccatgtggtgtgatattggctccatgtgccttgtttgtaataacatttccatgtgtcttgggaagaaccatatataagcagagctggtttagtgaaccctcagataggcctagaccatggccagcagtgagaatgtcataacagagttcatgagattcaaggtgaggatggagggaactgtcaatggtcatgagtttgagattgaaggggaaggggagggcagaccctatgagggccacaacacagtcaaattgaaggtgaccaaagggggaccccttccctttgcctgggacatcctgagcccacagtttcagtatggttccaaagtttatgtaaagcaccctgctgacatccctgactacaagaaactgtccttcccagaaggattcaagtgggaaagggtcatgaactttgaggatggaggggttgcaacagtgacccaggacagttctctccaagatggctgtttcatctacaaggtaaaattcattggtgtgaactttccctctgatggcccagtgatgcaaaaaaagaccatgggctgggaagcctcaacagaaaggctgtaccctagagatggagttctcaagggtgagacccacaaagctctaaagctcaaagatgggggccactatctggtggagttcaagagcatctacatggcaaaaaagccagtgcagttgcctggctattactatgtggatgccaagcttgacataacctcacacaatgaagactacactattgtggaacagtatgagaggactgagggaagacatcatctgtttctgtgaattcgcactgcatggacttacctgcctggtggtatcagtcacaggctctgataaggattcagctgttgtataaataaagcatgcagcctagcaggaaccatgttaatctctcttggttgtttccttggaatactcctaagcacattaggtttttagatct
